United States Patent Application Publication US 2016/0319361 A1 - sequence listing, part 19

SEQ ID NO: 506425 - DNA, 30 bp, Artificial Sequence
  Synthetic oligonucleotide
tccaattagttatacgtagacactccgtaa

SEQ ID NO: 506426 - DNA, 30 bp, Artificial Sequence
  Synthetic oligonucleotide
atttgtgaagtattgctggggcctccgtaa

SEQ ID NO: 506427 - DNA, 30 bp, Artificial Sequence
  Synthetic oligonucleotide
ctaagacatcacggtgagtcgtccgcgtaa

SEQ ID NO: 506428 - DNA, 30 bp, Artificial Sequence
  Synthetic oligonucleotide
gtggaaaccttaaactgcgtatgcgcgtaa

SEQ ID NO: 506429 - DNA, 30 bp, Artificial Sequence
  Synthetic oligonucleotide
tgttacaacgttcctgtttttttcgcgtaa

SEQ ID NO: 506430 - DNA, 30 bp, Artificial Sequence
  Synthetic oligonucleotide
cagcacgctaacagccctctctcggcgtaa

SEQ ID NO: 506431 - DNA, 30 bp, Artificial Sequence
  Synthetic oligonucleotide
ccttgtaggcagaaaaacgcgtttgcgtaa

SEQ ID NO: 506432 - DNA, 30 bp, Artificial Sequence
  Synthetic oligonucleotide
gtttctaatagggtactttggtcatcgtaa

SEQ ID NO: 506433 - DNA, 30 bp, Artificial Sequence
  Synthetic oligonucleotide
agcggttggacttctggcggacactcgtaa

SEQ ID NO: 506434 - DNA, 30 bp, Artificial Sequence
  Synthetic oligonucleotide
gatcttttgctactgcaaaagccctcgtaa

SEQ ID NO: 506435 - DNA, 30 bp, Artificial Sequence
  Synthetic oligonucleotide
aatgttacaagcgggcggtcatcctcgtaa

SEQ ID NO: 506436 - DNA, 30 bp, Artificial Sequence
  Synthetic oligonucleotide
ataatactcagatcacgggggtgctcgtaa

SEQ ID NO: 506437 - DNA, 30 bp, Artificial Sequence
  Synthetic oligonucleotide
tccatccgccgttttacggtcaagtcgtaa

SEQ ID NO: 506438 - DNA, 30 bp, Artificial Sequence
  Synthetic oligonucleotide
ctcaatcaaagtgagcgtttgaggtcgtaa

SEQ ID NO: 506439 - DNA, 30 bp, Artificial Sequence
  Synthetic oligonucleotide
tacgattaccaaacgctagagcgttcgtaa

SEQ ID NO: 506440 - DNA, 30 bp, Artificial Sequence
  Synthetic oligonucleotide
ggtcaatacagggacaggctggaaaggtaa

SEQ ID NO: 506441 - DNA, 30 bp, Artificial Sequence
  Synthetic oligonucleotide
acttctactcgctgccgcgcgttaaggtaa

SEQ ID NO: 506442 - DNA, 30 bp, Artificial Sequence
  Synthetic oligonucleotide
aagacgtcgagcgcctaaggcaacaggtaa

SEQ ID NO: 506443 - DNA, 30 bp, Artificial Sequence
  Synthetic oligonucleotide
gctaaggtgagacatttgaagaacaggtaa

SEQ ID NO: 506444 - DNA, 30 bp, Artificial Sequence
  Synthetic oligonucleotide
aaatttgtaaaggaaaaccttaacaggtaa

SEQ ID NO: 506445 - DNA, 30 bp, Artificial Sequence
  Synthetic oligonucleotide
actgtttaagctttttgtccttccaggtaa

SEQ ID NO: 506446 - DNA, 30 bp, Artificial Sequence
  Synthetic oligonucleotide
acggtcattggcctcttttcacggaggtaa

SEQ ID NO: 506447 - DNA, 30 bp, Artificial Sequence
  Synthetic oligonucleotide
cgccttcatgctggtcgcagggataggtaa

SEQ ID NO: 506448 - DNA, 30 bp, Artificial Sequence
  Synthetic oligonucleotide
gttgtctctgtaacgcaggcgtgtaggtaa

SEQ ID NO: 506449 - DNA, 30 bp, Artificial Sequence
  Synthetic oligonucleotide
gaataccgttggtgaggcccaggacggtaa

SEQ ID NO: 506450 - DNA, 30 bp, Artificial Sequence
  Synthetic oligonucleotide
ggatgggacgcctggcctgcaggccggtaa

SEQ ID NO: 506451 - DNA, 30 bp, Artificial Sequence
  Synthetic oligonucleotide
gcagcttgtgctgtgtgttcccagcggtaa

SEQ ID NO: 506452 - DNA, 30 bp, Artificial Sequence
  Synthetic oligonucleotide
ccaccgtacgtcagcccgcgtcagcggtaa

SEQ ID NO: 506453 - DNA, 30 bp, Artificial Sequence
  Synthetic oligonucleotide
tcacgatacaaaacaccgcgcacgcggtaa

SEQ ID NO: 506454 - DNA, 30 bp, Artificial Sequence
  Synthetic oligonucleotide
tttatgttcaggaaaataatctatcggtaa

SEQ ID NO: 506455 - DNA, 30 bp, Artificial Sequence
  Synthetic oligonucleotide
tacacactccctaaaaagaagcttcggtaa

SEQ ID NO: 506456 - DNA, 30 bp, Artificial Sequence
  Synthetic oligonucleotide
agggagacaaggataaggaagacagggtaa

SEQ ID NO: 506457 - DNA, 30 bp, Artificial Sequence
  Synthetic oligonucleotide
tgcataacctagaaaggatgtaccgggtaa

SEQ ID NO: 506458 - DNA, 30 bp, Artificial Sequence
  Synthetic oligonucleotide
ggaagcaaaggtcgaaagggataggggtaa

SEQ ID NO: 506459 - DNA, 30 bp, Artificial Sequence
  Synthetic oligonucleotide
ccccgaagagaggataggaaccgggggtaa

SEQ ID NO: 506460 - DNA, 30 bp, Artificial Sequence
  Synthetic oligonucleotide
tattcattggaggagtcaatctttgggtaa

SEQ ID NO: 506461 - DNA, 30 bp, Artificial Sequence
  Synthetic oligonucleotide
tcaatacatggtccgtactatcaatggtaa

SEQ ID NO: 506462 - DNA, 30 bp, Artificial Sequence
  Synthetic oligonucleotide
aatatcgttctgaactctggcgcatggtaa

SEQ ID NO: 506463 - DNA, 30 bp, Artificial Sequence
  Synthetic oligonucleotide
gttccatgctcgtatctgcgcagatggtaa

SEQ ID NO: 506464 - DNA, 30 bp, Artificial Sequence
  Synthetic oligonucleotide
gagcctgtatatgcggggctaatatggtaa

SEQ ID NO: 506465 - DNA, 30 bp, Artificial Sequence
  Synthetic oligonucleotide
aagacgaggtagaggcagcccccctggtaa

SEQ ID NO: 506466 - DNA, 30 bp, Artificial Sequence
  Synthetic oligonucleotide
ttgaatactgtcttcctaggtagctggtaa

SEQ ID NO: 506467 - DNA, 30 bp, Artificial Sequence
  Synthetic oligonucleotide
ttgtaccgtgggcgccccaggttctggtaa

SEQ ID NO: 506468 - DNA, 30 bp, Artificial Sequence
  Synthetic oligonucleotide
agattcaatttgtatggcaacggaatgtaa

SEQ ID NO: 506469 - DNA, 30 bp, Artificial Sequence
  Synthetic oligonucleotide
tttattaagcgtacggtctggagcatgtaa

SEQ ID NO: 506470 - DNA, 30 bp, Artificial Sequence
  Synthetic oligonucleotide
gaaattcccagcttacgcctcatcatgtaa

SEQ ID NO: 506471 - DNA, 30 bp, Artificial Sequence
  Synthetic oligonucleotide
agcgtgggcggatcaacacacgcgatgtaa

SEQ ID NO: 506472 - DNA, 30 bp, Artificial Sequence
  Synthetic oligonucleotide
ttggttcgccgtggtgtcgagacgctgtaa

SEQ ID NO: 506473 - DNA, 30 bp, Artificial Sequence
  Synthetic oligonucleotide
aagggtgtccttggaaaacatcggctgtaa

SEQ ID NO: 506474 - DNA, 30 bp, Artificial Sequence
  Synthetic oligonucleotide
gtcatgtcgtatgtcgaccaggaggtgtaa

SEQ ID NO: 506475 - DNA, 30 bp, Artificial Sequence
  Synthetic oligonucleotide
gagtttttgacggggcaacgtgcggtgtaa

SEQ ID NO: 506476 - DNA, 30 bp, Artificial Sequence
  Synthetic oligonucleotide
aactgaatcacgacgtattcgtctgtgtaa

SEQ ID NO: 506477 - DNA, 30 bp, Artificial Sequence
  Synthetic oligonucleotide
ccatccggggtttatcattttacgttgtaa

SEQ ID NO: 506478 - DNA, 30 bp, Artificial Sequence
  Synthetic oligonucleotide
tatttcagaaatcgagcttgcaatttgtaa

SEQ ID NO: 506479 - DNA, 30 bp, Artificial Sequence
  Synthetic oligonucleotide
tcgcatttggagagcagtccgtatttgtaa

SEQ ID NO: 506480 - DNA, 30 bp, Artificial Sequence
  Synthetic oligonucleotide
cagaccagcagaactggatctctaaattaa

SEQ ID NO: 506481 - DNA, 30 bp, Artificial Sequence
  Synthetic oligonucleotide
ccgcgtttctctccgtcacttttaaattaa

SEQ ID NO: 506482 - DNA, 30 bp, Artificial Sequence
  Synthetic oligonucleotide
aaccgacttcaacaacggtaacgcaattaa

SEQ ID NO: 506483 - DNA, 30 bp, Artificial Sequence
  Synthetic oligonucleotide
gatttccacccaccctccacttgcaattaa

SEQ ID NO: 506484 - DNA, 30 bp, Artificial Sequence
  Synthetic oligonucleotide
gtaatacggttacttggcgcagagaattaa

SEQ ID NO: 506485 - DNA, 30 bp, Artificial Sequence
  Synthetic oligonucleotide
cgctcagtatagaaaacggtgcctaattaa

SEQ ID NO: 506486 - DNA, 30 bp, Artificial Sequence
  Synthetic oligonucleotide
ggggaatgatactggtccacgagtaattaa

SEQ ID NO: 506487 - DNA, 27 bp, Artificial Sequence
  Synthetic oligonucleotide
agattaatagcgctcgacggtaattaa

SEQ ID NO: 506488 - DNA, 30 bp, Artificial Sequence
  Synthetic oligonucleotide
tgtataccgtcattaagagatcttaattaa

SEQ ID NO: 506489 - DNA, 30 bp, Artificial Sequence
  Synthetic oligonucleotide
tagtaattatgtcgtgctatcgaacattaa

SEQ ID NO: 506490 - DNA, 30 bp, Artificial Sequence
  Synthetic oligonucleotide
aaaatttatgggtcgagtctggcacattaa

SEQ ID NO: 506491 - DNA, 30 bp, Artificial Sequence
  Synthetic oligonucleotide
agttgccccatccaggggcagtgccattaa

SEQ ID NO: 506492 - DNA, 30 bp, Artificial Sequence
  Synthetic oligonucleotide
atggttcgggcgggtcgactgcagcattaa

SEQ ID NO: 506493 - DNA, 30 bp, Artificial Sequence
  Synthetic oligonucleotide
gaattattcttggtccccactgagcattaa

SEQ ID NO: 506494 - DNA, 30 bp, Artificial Sequence
  Synthetic oligonucleotide
ataccgatctttacgctgtaagcgcattaa

SEQ ID NO: 506495 - DNA, 30 bp, Artificial Sequence
  Synthetic oligonucleotide
tgtttcgctggagcttagtcaatgcattaa

SEQ ID NO: 506496 - DNA, 30 bp, Artificial Sequence
  Synthetic oligonucleotide
caatttgacatgccgtgggaattgcattaa

SEQ ID NO: 506497 - DNA, 30 bp, Artificial Sequence
  Synthetic oligonucleotide
tagcatcgcattttttatggggctcattaa

SEQ ID NO: 506498 - DNA, 30 bp, Artificial Sequence
  Synthetic oligonucleotide
ggcgaaacgcaagataggcctaaggattaa

SEQ ID NO: 506499 - DNA, 30 bp, Artificial Sequence
  Synthetic oligonucleotide
aagccatgtcgatgatcaatgacggattaa

SEQ ID NO: 506500 - DNA, 30 bp, Artificial Sequence
  Synthetic oligonucleotide
ccggactactcagaaaaagccccggattaa

SEQ ID NO: 506501 - DNA, 30 bp, Artificial Sequence
  Synthetic oligonucleotide
tgacctttgtctataagtgaagtatattaa

SEQ ID NO: 506502 - DNA, 30 bp, Artificial Sequence
  Synthetic oligonucleotide
aaatcagctagcttgggcggcaagtattaa

SEQ ID NO: 506503 - DNA, 30 bp, Artificial Sequence
  Synthetic oligonucleotide
aagtacaaacaggaacgctttccgtattaa

SEQ ID NO: 506504 - DNA, 30 bp, Artificial Sequence
  Synthetic oligonucleotide
gtacagtgctcagcacgtcacgggtattaa

SEQ ID NO: 506505 - DNA, 30 bp, Artificial Sequence
  Synthetic oligonucleotide
ttcacagagtttcctgttgctcattattaa

SEQ ID NO: 506506 - DNA, 30 bp, Artificial Sequence
  Synthetic oligonucleotide
accccagagcttgcagttatgtgttattaa

SEQ ID NO: 506507 - DNA, 30 bp, Artificial Sequence
  Synthetic oligonucleotide
acgatacacgttcggttacacatttattaa

SEQ ID NO: 506508 - DNA, 31 bp, Artificial Sequence
  Synthetic oligonucleotide
tattcatgtgtccctttggcatggaacttaa

SEQ ID NO: 506509 - DNA, 30 bp, Artificial Sequence
  Synthetic oligonucleotide
tactgcgagctaatggtcctagacacttaa

SEQ ID NO: 506510 - DNA, 30 bp, Artificial Sequence
  Synthetic oligonucleotide
aaatttttcttctccggggccaggacttaa

SEQ ID NO: 506511 - DNA, 30 bp, Artificial Sequence
  Synthetic oligonucleotide
gcttgacaccccccgaccggggttacttaa

SEQ ID NO: 506512 - DNA, 30 bp, Artificial Sequence
  Synthetic oligonucleotide
taaacagtacgggtgctatcaataccttaa

SEQ ID NO: 506513 - DNA, 30 bp, Artificial Sequence
  Synthetic oligonucleotide
ggcggcagcagaagatattcactaccttaa

SEQ ID NO: 506514 - DNA, 30 bp, Artificial Sequence
  Synthetic oligonucleotide
agaacgccgtggaagttacgggtaccttaa

SEQ ID NO: 506515 - DNA, 30 bp, Artificial Sequence
  Synthetic oligonucleotide
tttagtatcgcgctctaggtgcctccttaa

SEQ ID NO: 506516 - DNA, 30 bp, Artificial Sequence
  Synthetic oligonucleotide
aatgttaaccaagtcacctgatgtccttaa

SEQ ID NO: 506517 - DNA, 30 bp, Artificial Sequence
  Synthetic oligonucleotide
atccaacgagcatacgcctgtggagcttaa

SEQ ID NO: 506518 - DNA, 30 bp, Artificial Sequence
  Synthetic oligonucleotide
agccacaaggtctgggtttgtcacgcttaa

SEQ ID NO: 506519 - DNA, 30 bp, Artificial Sequence
  Synthetic oligonucleotide
ttgaaccgatccgtaagcgctgacgcttaa

SEQ ID NO: 506520 - DNA, 30 bp, Artificial Sequence
  Synthetic oligonucleotide
tataaggttgaataaggacctagcgcttaa

SEQ ID NO: 506521 - DNA, 30 bp, Artificial Sequence
  Synthetic oligonucleotide
ttccaaaagtattgacgctgtatggcttaa

SEQ ID NO: 506522 - DNA, 30 bp, Artificial Sequence
  Synthetic oligonucleotide
ttttcaactactattcatagtgaatcttaa

SEQ ID NO: 506523 - DNA, 30 bp, Artificial Sequence
  Synthetic oligonucleotide
ccgcgttaagtcaggttccactcatcttaa

SEQ ID NO: 506524 - DNA, 30 bp, Artificial Sequence
  Synthetic oligonucleotide
tcagtagtaagatattacaatgtatcttaa

SEQ ID NO: 506525 - DNA, 30 bp, Artificial Sequence
  Synthetic oligonucleotide
tgctctgttgagtaaagtgcctagtcttaa

SEQ ID NO: 506526 - DNA, 30 bp, Artificial Sequence
  Synthetic oligonucleotide
gtatctaggtaatgtgtggcgaattcttaa

SEQ ID NO: 506527 - DNA, 30 bp, Artificial Sequence
  Synthetic oligonucleotide
agttgtaatttattacggtggaattcttaa

SEQ ID NO: 506528 - DNA, 30 bp, Artificial Sequence
  Synthetic oligonucleotide
ctccgcctgctttacatgccgctttcttaa

SEQ ID NO: 506529 - DNA, 30 bp, Artificial Sequence
  Synthetic oligonucleotide
ataatgtttgtgagtttgtcagaaagttaa

SEQ ID NO: 506530 - DNA, 30 bp, Artificial Sequence
  Synthetic oligonucleotide
tgagtttcgattgatttcggcagaagttaa

SEQ ID NO: 506531 - DNA, 30 bp, Artificial Sequence
  Synthetic oligonucleotide
tacaacctagggggcaatcaatccagttaa

SEQ ID NO: 506532 - DNA, 30 bp, Artificial Sequence
  Synthetic oligonucleotide
gtacttgagtaaatctatttctccagttaa

SEQ ID NO: 506533 - DNA, 30 bp, Artificial Sequence
  Synthetic oligonucleotide
cgcgtcaaattcggaaaggtaagcagttaa

SEQ ID NO: 506534 - DNA, 30 bp, Artificial Sequence
  Synthetic oligonucleotide
gcgtcaaagacggatgtctttatcagttaa

SEQ ID NO: 506535 - DNA, 30 bp, Artificial Sequence
  Synthetic oligonucleotide
tcttcactatatggcgcacgttagagttaa

SEQ ID NO: 506536 - DNA, 30 bp, Artificial Sequence
  Synthetic oligonucleotide
aaaaggagcggactatttcaatgtagttaa

SEQ ID NO: 506537 - DNA, 30 bp, Artificial Sequence
  Synthetic oligonucleotide
tacaagcaaaggtggaagtgcgcacgttaa

SEQ ID NO: 506538 - DNA, 30 bp, Artificial Sequence
  Synthetic oligonucleotide
cagcatagggcgttacgtgctatacgttaa

SEQ ID NO: 506539 - DNA, 30 bp, Artificial Sequence
  Synthetic oligonucleotide
atcgaagcgcatctttatcttttacgttaa

SEQ ID NO: 506540 - DNA, 30 bp, Artificial Sequence
  Synthetic oligonucleotide
tgagggggaactagacaagcgaaccgttaa

SEQ ID NO: 506541 - DNA, 30 bp, Artificial Sequence
  Synthetic oligonucleotide
tttatgtatagcacgctcacataccgttaa

SEQ ID NO: 506542 - DNA, 30 bp, Artificial Sequence
  Synthetic oligonucleotide
gatggctgcccatcggaggcagcccgttaa

SEQ ID NO: 506543 - DNA, 30 bp, Artificial Sequence
  Synthetic oligonucleotide
ctcttcgattgtagcggagagatgcgttaa

SEQ ID NO: 506544 - DNA, 30 bp, Artificial Sequence
  Synthetic oligonucleotide
ggacactccgctggtgggcccagtcgttaa

SEQ ID NO: 506545 - DNA, 30 bp, Artificial Sequence
  Synthetic oligonucleotide
gagtgcctccagaatatcgaatgtcgttaa

SEQ ID NO: 506546 - DNA, 30 bp, Artificial Sequence
  Synthetic oligonucleotide
agtacaatgatgaaaatataccttcgttaa

SEQ ID NO: 506547 - DNA, 30 bp, Artificial Sequence
  Synthetic oligonucleotide
ggccgccacttatgaacctcctaaggttaa

SEQ ID NO: 506548 - DNA, 30 bp, Artificial Sequence
  Synthetic oligonucleotide
gttgtgctttgtcaggattgacgaggttaa

SEQ ID NO: 506549 - DNA, 30 bp, Artificial Sequence
  Synthetic oligonucleotide
gtagacttaagtctcgaccgtagcggttaa

SEQ ID NO: 506550 - DNA, 30 bp, Artificial Sequence
  Synthetic oligonucleotide
gctaagcatggacaacagctccagggttaa

SEQ ID NO: 506551 - DNA, 30 bp, Artificial Sequence
  Synthetic oligonucleotide
gatctgagtacgggtcccgcatagggttaa

SEQ ID NO: 506552 - DNA, 30 bp, Artificial Sequence
  Synthetic oligonucleotide
ggagtttgctcgggtagtaggtatggttaa

SEQ ID NO: 506553 - DNA, 30 bp, Artificial Sequence
  Synthetic oligonucleotide
ccccagataccaggtcccaagtctggttaa

SEQ ID NO: 506554 - DNA, 30 bp, Artificial Sequence
  Synthetic oligonucleotide
gaaggtatctagacgcggctataatgttaa

SEQ ID NO: 506555 - DNA, 30 bp, Artificial Sequence
  Synthetic oligonucleotide
cgcaaggacacgcataacggagactgttaa

SEQ ID NO: 506556 - DNA, 30 bp, Artificial Sequence
  Synthetic oligonucleotide
ttctataaccatgggaaatcctgctgttaa

SEQ ID NO: 506557 - DNA, 30 bp, Artificial Sequence
  Synthetic oligonucleotide
tttgatgacgaaataggaacccggtgttaa

SEQ ID NO: 506558 - DNA, 30 bp, Artificial Sequence
  Synthetic oligonucleotide
tttaacattccactgtccagggattgttaa

SEQ ID NO: 506559 - DNA, 30 bp, Artificial Sequence
  Synthetic oligonucleotide
gtcattgactcgaattaaaattcttgttaa

SEQ ID NO: 506560 - DNA, 30 bp, Artificial Sequence
  Synthetic oligonucleotide
ttgaaagcgacacttctttaactttgttaa

SEQ ID NO: 506561 - DNA, 30 bp, Artificial Sequence
  Synthetic oligonucleotide
ttaagattctaggtctacccattttgttaa

SEQ ID NO: 506562 - DNA, 30 bp, Artificial Sequence
  Synthetic oligonucleotide
acccggatatgagtatgctgcttttgttaa

SEQ ID NO: 506563 - DNA, 30 bp, Artificial Sequence
  Synthetic oligonucleotide
caaataagttttgtgttcgctgcaatttaa

SEQ ID NO: 506564 - DNA, 30 bp, Artificial Sequence
  Synthetic oligonucleotide
aatcaatttgatttgttttcaagaatttaa

SEQ ID NO: 506565 - DNA, 30 bp, Artificial Sequence
  Synthetic oligonucleotide
tttgagccgtagtaaaatactcgaatttaa

SEQ ID NO: 506566 - DNA, 30 bp, Artificial Sequence
  Synthetic oligonucleotide
aaataactgttagaagcggggggaatttaa

SEQ ID NO: 506567 - DNA, 30 bp, Artificial Sequence
  Synthetic oligonucleotide
agcattaaatgtaggtcaataagcatttaa

SEQ ID NO: 506568 - DNA, 30 bp, Artificial Sequence
  Synthetic oligonucleotide
atacatttgagacttcagatggtcatttaa

SEQ ID NO: 506569 - DNA, 30 bp, Artificial Sequence
  Synthetic oligonucleotide
gtttgttagggtgattcgagtgagatttaa

SEQ ID NO: 506570 - DNA, 30 bp, Artificial Sequence
  Synthetic oligonucleotide
aattgcccgtttcccggtcctacgatttaa

SEQ ID NO: 506571 - DNA, 30 bp, Artificial Sequence
  Synthetic oligonucleotide
acgcagttcgtggatgttaatccgatttaa

SEQ ID NO: 506572 - DNA, 30 bp, Artificial Sequence
  Synthetic oligonucleotide
tctgccacggcatttatactacttatttaa

SEQ ID NO: 506573 - DNA, 30 bp, Artificial Sequence
  Synthetic oligonucleotide
cgctatattaaacaattaagatttatttaa

SEQ ID NO: 506574 - DNA, 30 bp, Artificial Sequence
  Synthetic oligonucleotide
ccggcccctccctacgccaggccactttaa

SEQ ID NO: 506575 - DNA, 30 bp, Artificial Sequence
  Synthetic oligonucleotide
aagctctcgacaaattaatgggcactttaa

SEQ ID NO: 506576 - DNA, 30 bp, Artificial Sequence
  Synthetic oligonucleotide
gataagtttaaagggtcaagaggactttaa

SEQ ID NO: 506577 - DNA, 30 bp, Artificial Sequence
  Synthetic oligonucleotide
ttcccataccttggttcgtcccggctttaa

SEQ ID NO: 506578 - DNA, 30 bp, Artificial Sequence
  Synthetic oligonucleotide
ctaatatatcagaccgttagcgatctttaa

SEQ ID NO: 506579 - DNA, 30 bp, Artificial Sequence
  Synthetic oligonucleotide
ggaagtgaatattaactatttgcagtttaa

SEQ ID NO: 506580 - DNA, 30 bp, Artificial Sequence
  Synthetic oligonucleotide
taatccgcagcacctaaagattcagtttaa

SEQ ID NO: 506581 - DNA, 30 bp, Artificial Sequence
  Synthetic oligonucleotide
gactcattctgtcacgtttgtttagtttaa

SEQ ID NO: 506582 - DNA, 30 bp, Artificial Sequence
  Synthetic oligonucleotide
gtgaattcatagaatctcagcgacgtttaa

SEQ ID NO: 506583 - DNA, 30 bp, Artificial Sequence
  Synthetic oligonucleotide
gagtgagggaatgtcaggtcgggcgtttaa

SEQ ID NO: 506584 - DNA, 30 bp, Artificial Sequence
  Synthetic oligonucleotide
gagaagcgccgtattcgcactgcggtttaa

SEQ ID NO: 506585 - DNA, 30 bp, Artificial Sequence
  Synthetic oligonucleotide
cgtgccattttaaacctcgatagggtttaa

SEQ ID NO: 506586 - DNA, 30 bp, Artificial Sequence
  Synthetic oligonucleotide
atattgaattccgacaactgtattgtttaa

SEQ ID NO: 506587 - DNA, 30 bp, Artificial Sequence
  Synthetic oligonucleotide
tgtgcagacatgatccgcgctgcattttaa

SEQ ID NO: 506588 - DNA, 30 bp, Artificial Sequence
  Synthetic oligonucleotide
tctggttgtgacagacactgcttattttaa

SEQ ID NO: 506589 - DNA, 30 bp, Artificial Sequence
  Synthetic oligonucleotide
ttctcggggcattccatagcgcacttttaa

SEQ ID NO: 506590 - DNA, 30 bp, Artificial Sequence
  Synthetic oligonucleotide
acccattttcaatctcgctttccgttttaa

SEQ ID NO: 506591 - DNA, 30 bp, Artificial Sequence
  Synthetic oligonucleotide
gatttctggagagccgtaacacggttttaa

SEQ ID NO: 506592 - DNA, 30 bp, Artificial Sequence
  Synthetic oligonucleotide
gctccgggaacacaatgtcccgggttttaa

SEQ ID NO: 506593 - DNA, 30 bp, Artificial Sequence
  Synthetic oligonucleotide
atttaaattgtattccactgtgggttttaa

SEQ ID NO: 506594 - DNA, 30 bp, Artificial Sequence
  Synthetic oligonucleotide
gctcatttttcataaagtcacaatttttaa

SEQ ID NO: 506595 - DNA, 30 bp, Artificial Sequence
  Synthetic oligonucleotide
gtgatgattaaatgccagcgcaatttttaa

SEQ ID NO: 506596 - DNA, 30 bp, Artificial Sequence
  Synthetic oligonucleotide
gcattctaggcacagctcgttaacaaaaca

SEQ ID NO: 506597 - DNA, 30 bp, Artificial Sequence
  Synthetic oligonucleotide
atcgccgcttgttagggttgtaccaaaaca

SEQ ID NO: 506598 - DNA, 30 bp, Artificial Sequence
  Synthetic oligonucleotide
gaatatatatggttatggtttccgaaaaca

SEQ ID NO: 506599 - DNA, 30 bp, Artificial Sequence
  Synthetic oligonucleotide
ctgaatagaaggggggagtcgatgaaaaca

SEQ ID NO: 506600 - DNA, 30 bp, Artificial Sequence
  Synthetic oligonucleotide
agcggcagtttcaagcgtctacataaaaca

SEQ ID NO: 506601 - DNA, 30 bp, Artificial Sequence
  Synthetic oligonucleotide
aaagctatagggatatctgtagagcaaaca

SEQ ID NO: 506602 - DNA, 30 bp, Artificial Sequence
  Synthetic oligonucleotide
acgccgacctaggttaattctgcgcaaaca

SEQ ID NO: 506603 - DNA, 30 bp, Artificial Sequence
  Synthetic oligonucleotide
gttttattaataccagtgggtactcaaaca

SEQ ID NO: 506604 - DNA, 30 bp, Artificial Sequence
  Synthetic oligonucleotide
tagaggttcttttttaacttggttcaaaca

SEQ ID NO: 506605 - DNA, 30 bp, Artificial Sequence
  Synthetic oligonucleotide
ttcgtatcttgttaacataattaagaaaca

SEQ ID NO: 506606 - DNA, 30 bp, Artificial Sequence
  Synthetic oligonucleotide
ttcaacagcgcacacgggattatagaaaca

SEQ ID NO: 506607 - DNA, 30 bp, Artificial Sequence
  Synthetic oligonucleotide
aggtggtaacgttgctacttaaaggaaaca

SEQ ID NO: 506608 - DNA, 30 bp, Artificial Sequence
  Synthetic oligonucleotide
gattctcaagttaattagcatctggaaaca

SEQ ID NO: 506609 - DNA, 30 bp, Artificial Sequence
  Synthetic oligonucleotide
gccctctcacttgggctatcttttgaaaca

SEQ ID NO: 506610 - DNA, 30 bp, Artificial Sequence
  Synthetic oligonucleotide
tgctaacgcttaaggtcaagggtataaaca

SEQ ID NO: 506611 - DNA, 30 bp, Artificial Sequence
  Synthetic oligonucleotide
aacatgacacggtctgattttgtataaaca

SEQ ID NO: 506612 - DNA, 30 bp, Artificial Sequence
  Synthetic oligonucleotide
gttatataggttgctgggtttgtctaaaca

SEQ ID NO: 506613 - DNA, 30 bp, Artificial Sequence
  Synthetic oligonucleotide
ttatcatgcatctaggtgcctgcgtaaaca

SEQ ID NO: 506614 - DNA, 30 bp, Artificial Sequence
  Synthetic oligonucleotide
ttgccactttatggccttgggatgtaaaca

SEQ ID NO: 506615 - DNA, 30 bp, Artificial Sequence
  Synthetic oligonucleotide
gtcacgtgggctgccaagtggctgtaaaca

SEQ ID NO: 506616 - DNA, 30 bp, Artificial Sequence
  Synthetic oligonucleotide
tattcgatttcgatagtctttagttaaaca

SEQ ID NO: 506617 - DNA, 30 bp, Artificial Sequence
  Synthetic oligonucleotide
cttcattgttaagctttgaggaagacaaca

SEQ ID NO: 506618 - DNA, 30 bp, Artificial Sequence
  Synthetic oligonucleotide
ccgacggcctccatgttcttcgcaccaaca

SEQ ID NO: 506619 - DNA, 30 bp, Artificial Sequence
  Synthetic oligonucleotide
tccgcggctgggtgtactagtgcaccaaca

SEQ ID NO: 506620 - DNA, 30 bp, Artificial Sequence
  Synthetic oligonucleotide
gcacatgttcttaggcaaattggcccaaca

SEQ ID NO: 506621 - DNA, 30 bp, Artificial Sequence
  Synthetic oligonucleotide
aacaatttttgatccggatatgtcccaaca

SEQ ID NO: 506622 - DNA, 30 bp, Artificial Sequence
  Synthetic oligonucleotide
cagttgtctagatccaacgatgggccaaca

SEQ ID NO: 506623 - DNA, 30 bp, Artificial Sequence
  Synthetic oligonucleotide
agttggctcggggagagtggtgggccaaca

SEQ ID NO: 506624 - DNA, 30 bp, Artificial Sequence
  Synthetic oligonucleotide
ctccacagacagattttgtcgtgtccaaca

SEQ ID NO: 506625 - DNA, 30 bp, Artificial Sequence
  Synthetic oligonucleotide
acggagtatccccgaatataacttccaaca

SEQ ID NO: 506626 - DNA, 30 bp, Artificial Sequence
  Synthetic oligonucleotide
atttgggcgtttcttacaaggttagcaaca

SEQ ID NO: 506627 - DNA, 30 bp, Artificial Sequence
  Synthetic oligonucleotide
ctaatatcaacctcctccttcgacgcaaca

SEQ ID NO: 506628 - DNA, 30 bp, Artificial Sequence
  Synthetic oligonucleotide
ttgaagccgaatccttgggatggcgcaaca

SEQ ID NO: 506629 - DNA, 30 bp, Artificial Sequence
  Synthetic oligonucleotide
atcggggtgcggccccgtcggaaggcaaca

SEQ ID NO: 506630 - DNA, 30 bp, Artificial Sequence
  Synthetic oligonucleotide
cgctaatgttcctctaagcatgaggcaaca

SEQ ID NO: 506631 - DNA, 30 bp, Artificial Sequence
  Synthetic oligonucleotide
aggcgcggttcttttggttcttgggcaaca

SEQ ID NO: 506632 - DNA, 30 bp, Artificial Sequence
  Synthetic oligonucleotide
ctcagatcttttatggttggggatgcaaca

SEQ ID NO: 506633 - DNA, 30 bp, Artificial Sequence
  Synthetic oligonucleotide
tagcagcattgaggtgagctcagtgcaaca

SEQ ID NO: 506634 - DNA, 30 bp, Artificial Sequence
  Synthetic oligonucleotide
gatcaccgtttaattactctgtttgcaaca

SEQ ID NO: 506635 - DNA, 30 bp, Artificial Sequence
  Synthetic oligonucleotide
gcattggttttactgtcgtataaatcaaca

SEQ ID NO: 506636 - DNA, 30 bp, Artificial Sequence
  Synthetic oligonucleotide
cttttcatgcggcgggtaggtgtatcaaca

SEQ ID NO: 506637 - DNA, 30 bp, Artificial Sequence
  Synthetic oligonucleotide
gccaaacctagtatagcgaaatgctcaaca

SEQ ID NO: 506638 - DNA, 30 bp, Artificial Sequence
  Synthetic oligonucleotide
caaggtcctgtcctcagttgggcttcaaca

SEQ ID NO: 506639 - DNA, 30 bp, Artificial Sequence
  Synthetic oligonucleotide
accttacgtgcactttgacataaaagaaca

SEQ ID NO: 506640 - DNA, 30 bp, Artificial Sequence
  Synthetic oligonucleotide
acgaagtagcagactttagagataagaaca

SEQ ID NO: 506641 - DNA, 30 bp, Artificial Sequence
  Synthetic oligonucleotide
atgctattttctggttccgttgtaagaaca

SEQ ID NO: 506642 - DNA, 30 bp, Artificial Sequence
  Synthetic oligonucleotide
tgccagatgtattcttgggagtacagaaca

SEQ ID NO: 506643 - DNA, 30 bp, Artificial Sequence
  Synthetic oligonucleotide
gccgccagactgttgaattcattcagaaca

SEQ ID NO: 506644 - DNA, 30 bp, Artificial Sequence
  Synthetic oligonucleotide
ttacagtaggacgacacctcagggagaaca

SEQ ID NO: 506645 - DNA, 30 bp, Artificial Sequence
  Synthetic oligonucleotide
tatggtatgaggcactaattcctgagaaca

SEQ ID NO: 506646 - DNA, 30 bp, Artificial Sequence
  Synthetic oligonucleotide
tgataaagtgaacgtttgatggctagaaca

SEQ ID NO: 506647 - DNA, 30 bp, Artificial Sequence
  Synthetic oligonucleotide
tatgaagacggaactgcatcatcccgaaca

SEQ ID NO: 506648 - DNA, 30 bp, Artificial Sequence
  Synthetic oligonucleotide
agaggattcaaggttaatgcgggccgaaca

SEQ ID NO: 506649 - DNA, 30 bp, Artificial Sequence
  Synthetic oligonucleotide
aagatatcaagaaggtgccatatccgaaca

SEQ ID NO: 506650 - DNA, 30 bp, Artificial Sequence
  Synthetic oligonucleotide
cccagcaaagccggtattagcttccgaaca

SEQ ID NO: 506651 - DNA, 30 bp, Artificial Sequence
  Synthetic oligonucleotide
ctagatgttcctcggcagagctagcgaaca

SEQ ID NO: 506652 - DNA, 30 bp, Artificial Sequence
  Synthetic oligonucleotide
tttctttaggaacggccgatgacgcgaaca

SEQ ID NO: 506653 - DNA, 30 bp, Artificial Sequence
  Synthetic oligonucleotide
attggatcggccaaacacacagtgcgaaca

SEQ ID NO: 506654 - DNA, 29 bp, Artificial Sequence
  Synthetic oligonucleotide
catcagtcttgggaacgtctgtgcgaaca

SEQ ID NO: 506655 - DNA, 31 bp, Artificial Sequence
  Synthetic oligonucleotide
agaggggttgtattctcagcatgctcgaaca

SEQ ID NO: 506656 - DNA, 30 bp, Artificial Sequence
  Synthetic oligonucleotide
aacgttcgacattcgcagtcgaaaggaaca

SEQ ID NO: 506657 - DNA, 30 bp, Artificial Sequence
  Synthetic oligonucleotide
cctctcgcggagcacgctgccaacggaaca

SEQ ID NO: 506658 - DNA, 30 bp, Artificial Sequence
  Synthetic oligonucleotide
aaacaagtgatctattagagtgacggaaca

SEQ ID NO: 506659 - DNA, 30 bp, Artificial Sequence
  Synthetic oligonucleotide
tagtgtggggggaagtccaacgtgggaaca

SEQ ID NO: 506660 - DNA, 30 bp, Artificial Sequence
  Synthetic oligonucleotide
aaatgtagtgaagatcctagtatatgaaca

SEQ ID NO: 506661 - DNA, 30 bp, Artificial Sequence
  Synthetic oligonucleotide
gtattgggttaacgatatttttcgtgaaca

SEQ ID NO: 506662 - DNA, 30 bp, Artificial Sequence
  Synthetic oligonucleotide
tcttcccccgcgctatgcttaagttgaaca

SEQ ID NO: 506663 - DNA, 30 bp, Artificial Sequence
  Synthetic oligonucleotide
taacaggaaaataatacaccgagaataaca

SEQ ID NO: 506664 - DNA, 30 bp, Artificial Sequence
  Synthetic oligonucleotide
tgggatggatgacactcgctacagataaca

SEQ ID NO: 506665 - DNA, 30 bp, Artificial Sequence
  Synthetic oligonucleotide
gagcattattatttatcattgccgataaca

SEQ ID NO: 506666 - DNA, 30 bp, Artificial Sequence
  Synthetic oligonucleotide
catacggtgggaccctgatcacctataaca

SEQ ID NO: 506667 - DNA, 30 bp, Artificial Sequence
  Synthetic oligonucleotide
agagggggagggaggggccgcacactaaca

SEQ ID NO: 506668 - DNA, 30 bp, Artificial Sequence
  Synthetic oligonucleotide
tttcatcggacaaggtcgagggccctaaca

SEQ ID NO: 506669 - DNA, 30 bp, Artificial Sequence
  Synthetic oligonucleotide
aagtccaactgccgcgcaactatgctaaca

SEQ ID NO: 506670 - DNA, 30 bp, Artificial Sequence
  Synthetic oligonucleotide
cctagctgaccccagacacctctgctaaca

SEQ ID NO: 506671 - DNA, 30 bp, Artificial Sequence
  Synthetic oligonucleotide
gagggagaccatatgatttcataagtaaca

SEQ ID NO: 506672 - DNA, 30 bp, Artificial Sequence
  Synthetic oligonucleotide
accagaggcggactagtgggtagagtaaca

SEQ ID NO: 506673 - DNA, 30 bp, Artificial Sequence
  Synthetic oligonucleotide
aggttagccaaactgaggtagcacgtaaca

SEQ ID NO: 506674 - DNA, 30 bp, Artificial Sequence
  Synthetic oligonucleotide
cggtacgtctagtttctctgtgtcgtaaca

SEQ ID NO: 506675 - DNA, 30 bp, Artificial Sequence
  Synthetic oligonucleotide
gggtttcttgtttcttctagaacggtaaca

SEQ ID NO: 506676 - DNA, 30 bp, Artificial Sequence
  Synthetic oligonucleotide
tgcggacatgtacgtatgtcgacggtaaca

SEQ ID NO: 506677 - DNA, 30 bp, Artificial Sequence
  Synthetic oligonucleotide
ctcaacgtacgttggcatgtcatggtaaca

SEQ ID NO: 506678 - DNA, 30 bp, Artificial Sequence
  Synthetic oligonucleotide
gtataggacccgcagcattattgtgtaaca

SEQ ID NO: 506679 - DNA, 30 bp, Artificial Sequence
  Synthetic oligonucleotide
gacgctctgggtgttaaacttaaattaaca

SEQ ID NO: 506680 - DNA, 30 bp, Artificial Sequence
  Synthetic oligonucleotide
cgctcgttgcagtacctcaacgtattaaca

SEQ ID NO: 506681 - DNA, 30 bp, Artificial Sequence
  Synthetic oligonucleotide
attgaacttttgtatttttatgtattaaca

SEQ ID NO: 506682 - DNA, 30 bp, Artificial Sequence
  Synthetic oligonucleotide
ttacatagatacagtggtacggtcttaaca

SEQ ID NO: 506683 - DNA, 30 bp, Artificial Sequence
  Synthetic oligonucleotide
ttcccgtatacaccgactcttgcgttaaca

SEQ ID NO: 506684 - DNA, 30 bp, Artificial Sequence
  Synthetic oligonucleotide
ctagtaagtttatggaccgaagggttaaca

SEQ ID NO: 506685 - DNA, 30 bp, Artificial Sequence
  Synthetic oligonucleotide
tagttcacaaaacaccattttagtttaaca

SEQ ID NO: 506686 - DNA, 30 bp, Artificial Sequence
  Synthetic oligonucleotide
ttggttgagaccatgtatattggtttaaca

SEQ ID NO: 506687 - DNA, 30 bp, Artificial Sequence
  Synthetic oligonucleotide
gcttatttgctgtcatacgctgtaaacaca

SEQ ID NO: 506688 - DNA, 30 bp, Artificial Sequence
  Synthetic oligonucleotide
gatttggggcgtccgaacgatgacaacaca

SEQ ID NO: 506689 - DNA, 30 bp, Artificial Sequence
  Synthetic oligonucleotide
taccggacagaagaatgagcggcgaacaca

SEQ ID NO: 506690 - DNA, 30 bp, Artificial Sequence
  Synthetic oligonucleotide
ccgtcgttggggagcttgggacataacaca

SEQ ID NO: 506691 - DNA, 30 bp, Artificial Sequence
  Synthetic oligonucleotide
atagcctgtcggttgcgcagtccacacaca

SEQ ID NO: 506692 - DNA, 30 bp, Artificial Sequence
  Synthetic oligonucleotide
tagccacgtggtattattctagcccacaca

SEQ ID NO: 506693 - DNA, 30 bp, Artificial Sequence
  Synthetic oligonucleotide
tgcatggatgggccctatggtgggcacaca

SEQ ID NO: 506694 - DNA, 30 bp, Artificial Sequence
  Synthetic oligonucleotide
cctactcgcgaagtgaagttacatcacaca

SEQ ID NO: 506695 - DNA, 30 bp, Artificial Sequence
  Synthetic oligonucleotide
aagaaagacgtacaaataccctttcacaca

SEQ ID NO: 506696 - DNA, 30 bp, Artificial Sequence
  Synthetic oligonucleotide
cttttatatcggcagtggccgcaagacaca

SEQ ID NO: 506697 - DNA, 30 bp, Artificial Sequence
  Synthetic oligonucleotide
aggaaatgcaaacgtctttcataagacaca

SEQ ID NO: 506698 - DNA, 30 bp, Artificial Sequence
  Synthetic oligonucleotide
cgtggtcaccccataaccaagctagacaca

SEQ ID NO: 506699 - DNA, 30 bp, Artificial Sequence
  Synthetic oligonucleotide
ttctgtgtcctgattcactatttagacaca

SEQ ID NO: 506700 - DNA, 30 bp, Artificial Sequence
  Synthetic oligonucleotide
tcttcatctgacacagtagtaaccgacaca

SEQ ID NO: 506701 - DNA, 30 bp, Artificial Sequence
  Synthetic oligonucleotide
gcaatgtagaataacccggttgcggacaca

SEQ ID NO: 506702 - DNA, 30 bp, Artificial Sequence
  Synthetic oligonucleotide
tggtcagtggcgtgggacgacaatgacaca

SEQ ID NO: 506703 - DNA, 30 bp, Artificial Sequence
  Synthetic oligonucleotide
aaagtgtgaacggtgattatgcgtgacaca

SEQ ID NO: 506704 - DNA, 30 bp, Artificial Sequence
  Synthetic oligonucleotide
cagggtcccttcttcgattccattgacaca

SEQ ID NO: 506705 - DNA, 30 bp, Artificial Sequence
  Synthetic oligonucleotide
ctatagtggagatatgcttattttgacaca

SEQ ID NO: 506706 - DNA, 30 bp, Artificial Sequence
  Synthetic oligonucleotide
atcttctttcaaaactcattggaatacaca

SEQ ID NO: 506707 - DNA, 30 bp, Artificial Sequence
  Synthetic oligonucleotide
gaatcgtatttgaccctgtggtcatacaca

SEQ ID NO: 506708 - DNA, 30 bp, Artificial Sequence
  Synthetic oligonucleotide
aagagtgcaagtcaatattaagcgtacaca

SEQ ID NO: 506709 - DNA, 30 bp, Artificial Sequence
  Synthetic oligonucleotide
atactgcacggagatccggttaggtacaca

SEQ ID NO: 506710 - DNA, 30 bp, Artificial Sequence
  Synthetic oligonucleotide
gaagggggaccatgggtaccaagttacaca

SEQ ID NO: 506711 - DNA, 30 bp, Artificial Sequence
  Synthetic oligonucleotide
gtcgttttgcccttcggtaagatttacaca

SEQ ID NO: 506712 - DNA, 30 bp, Artificial Sequence
  Synthetic oligonucleotide
gtcgttttccgacgcatggtgttttacaca

SEQ ID NO: 506713 - DNA, 30 bp, Artificial Sequence
  Synthetic oligonucleotide
tggttgccttgattctgtacacgaaccaca

SEQ ID NO: 506714 - DNA, 30 bp, Artificial Sequence
  Synthetic oligonucleotide
gtcgcgttccatctgtatagacacaccaca

SEQ ID NO: 506715 - DNA, 30 bp, Artificial Sequence
  Synthetic oligonucleotide
agcccgcaagccatcgtttgtaggaccaca

SEQ ID NO: 506716 - DNA, 30 bp, Artificial Sequence
  Synthetic oligonucleotide
tcgctgggaatattcaaatcttgtaccaca

SEQ ID NO: 506717 - DNA, 30 bp, Artificial Sequence
  Synthetic oligonucleotide
tttaagagtcggcgtgtcacgcaccccaca

SEQ ID NO: 506718 - DNA, 30 bp, Artificial Sequence
  Synthetic oligonucleotide
gccctcactttggggaatacttaccccaca

SEQ ID NO: 506719 - DNA, 30 bp, Artificial Sequence
  Synthetic oligonucleotide
tgagaatttttttaacaatcttatcccaca

SEQ ID NO: 506720 - DNA, 30 bp, Artificial Sequence
  Synthetic oligonucleotide
caaggttccagtggagcaactggagccaca

SEQ ID NO: 506721 - DNA, 30 bp, Artificial Sequence
  Synthetic oligonucleotide
attattgacccttagctgaccttagccaca

SEQ ID NO: 506722 - DNA, 30 bp, Artificial Sequence
  Synthetic oligonucleotide
actttaggattaggtcgtagcccggccaca

SEQ ID NO: 506723 - DNA, 30 bp, Artificial Sequence
  Synthetic oligonucleotide
cgccatccttttcacggtgatgatgccaca

SEQ ID NO: 506724 - DNA, 30 bp, Artificial Sequence
  Synthetic oligonucleotide
ctgtgggtaaacgatatcggctgtgccaca

SEQ ID NO: 506725 - DNA, 30 bp, Artificial Sequence
  Synthetic oligonucleotide
tcctatttgttatggggtgggttatccaca

SEQ ID NO: 506726 - DNA, 30 bp, Artificial Sequence
  Synthetic oligonucleotide
ggttgtcgatagtgctcgctcgactccaca

SEQ ID NO: 506727 - DNA, 30 bp, Artificial Sequence
  Synthetic oligonucleotide
gtttctatgccaattgcgcagcagtccaca

SEQ ID NO: 506728 - DNA, 30 bp, Artificial Sequence
  Synthetic oligonucleotide
gcaaggacttcggacaggattcggtccaca

SEQ ID NO: 506729 - DNA, 30 bp, Artificial Sequence
  Synthetic oligonucleotide
gcgtacagccgaaaaagggggctcagcaca

SEQ ID NO: 506730 - DNA, 30 bp, Artificial Sequence
  Synthetic oligonucleotide
tatggggttccggttacacgttggagcaca

SEQ ID NO: 506731 - DNA, 30 bp, Artificial Sequence
  Synthetic oligonucleotide
ataacacgcagcccctttagtcgtagcaca

SEQ ID NO: 506732 - DNA, 26 bp, Artificial Sequence
  Synthetic oligonucleotide
atccagttcacaaatcttcacgcaca

SEQ ID NO: 506733 - DNA, 30 bp, Artificial Sequence
  Synthetic oligonucleotide
cgaaattaacgttagacgttatgacgcaca

SEQ ID NO: 506734 - DNA, 30 bp, Artificial Sequence
  Synthetic oligonucleotide
caggcgtgaatataagggcttctgcgcaca

SEQ ID NO: 506735 - DNA, 30 bp, Artificial Sequence
  Synthetic oligonucleotide
gaaataatcagagaaaagatcgatcgcaca

SEQ ID NO: 506736 - DNA, 30 bp, Artificial Sequence
  Synthetic oligonucleotide
catttcgcgtatgatgtagtaactcgcaca

SEQ ID NO: 506737 - DNA, 30 bp, Artificial Sequence
  Synthetic oligonucleotide
ttgaccctctcttccgtgggatttcgcaca

SEQ ID NO: 506738 - DNA, 30 bp, Artificial Sequence
  Synthetic oligonucleotide
tccgtcaggctatggcgataaacaggcaca

SEQ ID NO: 506739 - DNA, 30 bp, Artificial Sequence
  Synthetic oligonucleotide
ctctagaccttccatcctgtcccaggcaca

SEQ ID NO: 506740 - DNA, 30 bp, Artificial Sequence
  Synthetic oligonucleotide
catgcactcgtcctttgtaatagaggcaca

SEQ ID NO: 506741 - DNA, 30 bp, Artificial Sequence
  Synthetic oligonucleotide
gataggggtgtatcctgtgttaaatgcaca

SEQ ID NO: 506742 - DNA, 30 bp, Artificial Sequence
  Synthetic oligonucleotide
ttcaaagctctcctcaggtaatcctgcaca

SEQ ID NO: 506743 - DNA, 30 bp, Artificial Sequence
  Synthetic oligonucleotide
ggcgcaaggtggactcattcgtattgcaca

SEQ ID NO: 506744 - DNA, 30 bp, Artificial Sequence
  Synthetic oligonucleotide
agcatggtcgtaaggggtcattgttgcaca

SEQ ID NO: 506745 - DNA, 30 bp, Artificial Sequence
  Synthetic oligonucleotide
atcattgcggctcccggggtagaaatcaca

SEQ ID NO: 506746 - DNA, 30 bp, Artificial Sequence
  Synthetic oligonucleotide
atcacggctcggcaccatgcatcaatcaca

SEQ ID NO: 506747 - DNA, 30 bp, Artificial Sequence
  Synthetic oligonucleotide
taaggttgtcgttaacgcggctacatcaca

SEQ ID NO: 506748 - DNA, 30 bp, Artificial Sequence
  Synthetic oligonucleotide
aatccaacccctgtgcaagtctgcatcaca

SEQ ID NO: 506749 - DNA, 30 bp, Artificial Sequence
  Synthetic oligonucleotide
tttgaaccttctgaggtatatgcgatcaca

SEQ ID NO: 506750 - DNA, 30 bp, Artificial Sequence
  Synthetic oligonucleotide
atagctagcgtgttatggaggtatatcaca

SEQ ID NO: 506751 - DNA, 30 bp, Artificial Sequence
  Synthetic oligonucleotide
agaagcatacccattgatgatgctatcaca

SEQ ID NO: 506752 - DNA, 30 bp, Artificial Sequence
  Synthetic oligonucleotide
cacagcgcctgatccgcagttattatcaca

SEQ ID NO: 506753 - DNA, 30 bp, Artificial Sequence
  Synthetic oligonucleotide
gcatgttgcagcgatactcactcgctcaca

SEQ ID NO: 506754 - DNA, 30 bp, Artificial Sequence
  Synthetic oligonucleotide
cgatgcccgactatgggccatcatctcaca

SEQ ID NO: 506755 - DNA, 30 bp, Artificial Sequence
  Synthetic oligonucleotide
acgtggaacgcctcccgacgttctctcaca

SEQ ID NO: 506756 - DNA, 29 bp, Artificial Sequence
  Synthetic oligonucleotide
gttgtgacgtgggcgttcttgtagtcaca

SEQ ID NO: 506757 - DNA, 38 bp, Artificial Sequence
  Synthetic oligonucleotide
tttgtgtaggtttactcccgtataaatgctgcgtcaca

SEQ ID NO: 506758 - DNA, 25 bp, Artificial Sequence
  Synthetic oligonucleotide
cctatcgaaaacccccctcgtcaca

SEQ ID NO: 506759 - DNA, 30 bp, Artificial Sequence
  Synthetic oligonucleotide
aaagtgtcctttggcaatcatggtgtcaca

SEQ ID NO: 506760 - DNA, 30 bp, Artificial Sequence
  Synthetic oligonucleotide
aataccccgggtatcataataattgtcaca

SEQ ID NO: 506761 - DNA, 30 bp, Artificial Sequence
  Synthetic oligonucleotide
actccccattgaatttttcaatttgtcaca

SEQ ID NO: 506762 - DNA, 30 bp, Artificial Sequence
  Synthetic oligonucleotide
atgacactatccctccatgaggatttcaca

SEQ ID NO: 506763 - DNA, 30 bp, Artificial Sequence
  Synthetic oligonucleotide
ggagcaaggcccaccgggcagactttcaca

SEQ ID NO: 506764 - DNA, 30 bp, Artificial Sequence
  Synthetic oligonucleotide
cttacttggggcgggataggtactttcaca

SEQ ID NO: 506765 - DNA, 30 bp, Artificial Sequence
  Synthetic oligonucleotide
aggaacgagtctataggacgcgctttcaca

SEQ ID NO: 506766 - DNA, 30 bp, Artificial Sequence
  Synthetic oligonucleotide
cagcctccggtcgcggtactgtctttcaca

SEQ ID NO: 506767 - DNA, 30 bp, Artificial Sequence
  Synthetic oligonucleotide
ccaatgtcgtaatgccagagaacaaagaca

SEQ ID NO: 506768 - DNA, 30 bp, Artificial Sequence
  Synthetic oligonucleotide
taatctgaattaaatgccgattagaagaca

SEQ ID NO: 506769 - DNA, 30 bp, Artificial Sequence
  Synthetic oligonucleotide
ttttcccgcccctgttattcggcgaagaca

SEQ ID NO: 506770 - DNA, 30 bp, Artificial Sequence
  Synthetic oligonucleotide
ccaagggacggtagctcgacctaacagaca

SEQ ID NO: 506771 - DNA, 30 bp, Artificial Sequence
  Synthetic oligonucleotide
gaatagtcagaggccttcccaatacagaca

SEQ ID NO: 506772 - DNA, 30 bp, Artificial Sequence
  Synthetic oligonucleotide
atttggcatgatctgagtggcgaccagaca

SEQ ID NO: 506773 - DNA, 30 bp, Artificial Sequence
  Synthetic oligonucleotide
tatcgcatcaccacgtactgttggcagaca

SEQ ID NO: 506774 - DNA, 30 bp, Artificial Sequence
  Synthetic oligonucleotide
gcgagtgtaggaagaaactagtctcagaca

SEQ ID NO: 506775 - DNA, 30 bp, Artificial Sequence
  Synthetic oligonucleotide
ctgacgctccgtaggacttaatgagagaca

SEQ ID NO: 506776 - DNA, 31 bp, Artificial Sequence
  Synthetic oligonucleotide
ggtgaattttagcatttgttaattagagaca

SEQ ID NO: 506777 - DNA, 30 bp, Artificial Sequence
  Synthetic oligonucleotide
tcgctagtattaaggccgcttcgcgagaca

SEQ ID NO: 506778 - DNA, 30 bp, Artificial Sequence
  Synthetic oligonucleotide
tcaggcacgattgaatactctgtcgagaca

SEQ ID NO: 506779 - DNA, 30 bp, Artificial Sequence
  Synthetic oligonucleotide
acagcatgctaagggtaacctcatgagaca

SEQ ID NO: 506780 - DNA, 30 bp, Artificial Sequence
  Synthetic oligonucleotide
tcttttatccgaagttgacaaaaatagaca

SEQ ID NO: 506781 - DNA, 30 bp, Artificial Sequence
  Synthetic oligonucleotide
gaaattgcgggcagcagctaataatagaca

SEQ ID NO: 506782 - DNA, 30 bp, Artificial Sequence
  Synthetic oligonucleotide
ttccgtcgcggaaaagtgtctgtatagaca

SEQ ID NO: 506783 - DNA, 30 bp, Artificial Sequence
  Synthetic oligonucleotide
acgaacgggttggtacgcaagcactagaca

SEQ ID NO: 506784 - DNA, 30 bp, Artificial Sequence
  Synthetic oligonucleotide
aatatctgttagtgagtacgtacctagaca

SEQ ID NO: 506785 - DNA, 30 bp, Artificial Sequence
  Synthetic oligonucleotide
cgtaaatctcaaaagccaaggaagtagaca

SEQ ID NO: 506786 - DNA, 30 bp, Artificial Sequence
  Synthetic oligonucleotide
cgcatgtaaattggatcaaataggtagaca

SEQ ID NO: 506787 - DNA, 30 bp, Artificial Sequence
  Synthetic oligonucleotide
ccgataagggaaagaaaagatgggtagaca

SEQ ID NO: 506788 - DNA, 30 bp, Artificial Sequence
  Synthetic oligonucleotide
tcgccagaaacctcgagcaacttgtagaca

SEQ ID NO: 506789 - DNA, 30 bp, Artificial Sequence
  Synthetic oligonucleotide
tatatcaatggggccgcgaccagttagaca

SEQ ID NO: 506790 - DNA, 30 bp, Artificial Sequence
  Synthetic oligonucleotide
gacattatgagaacgagggttctttagaca

SEQ ID NO: 506791 - DNA, 30 bp, Artificial Sequence
  Synthetic oligonucleotide
accataagttgggaatggcaggtttagaca

SEQ ID NO: 506792 - DNA, 30 bp, Artificial Sequence
  Synthetic oligonucleotide
ggtccgagtcaggaagaaaagcaaacgaca

SEQ ID NO: 506793 - DNA, 30 bp, Artificial Sequence
  Synthetic oligonucleotide
atagtccggaaataaacaaagccaacgaca

SEQ ID NO: 506794 - DNA, 30 bp, Artificial Sequence
  Synthetic oligonucleotide
tttactacgggtgacttcttgaacacgaca

SEQ ID NO: 506795 - DNA, 30 bp, Artificial Sequence
  Synthetic oligonucleotide
tattccgcatgaatcgagatgttcacgaca

SEQ ID NO: 506796 - DNA, 30 bp, Artificial Sequence
  Synthetic oligonucleotide
aaacgtaatgttcaatcggtatagacgaca

SEQ ID NO: 506797 - DNA, 30 bp, Artificial Sequence
  Synthetic oligonucleotide
tttcaaaagtcgcgtttgggttctacgaca

SEQ ID NO: 506798 - DNA, 30 bp, Artificial Sequence
  Synthetic oligonucleotide
actcaaatcataattcgacaaggaccgaca

SEQ ID NO: 506799 - DNA, 30 bp, Artificial Sequence
  Synthetic oligonucleotide
atcatagcctctgaccgaggtgacccgaca

SEQ ID NO: 506800 - DNA, 30 bp, Artificial Sequence
  Synthetic oligonucleotide
tagaaatcgctcgcactatgccggccgaca

SEQ ID NO: 506801 - DNA, 30 bp, Artificial Sequence
  Synthetic oligonucleotide
agagttatttttaaaggcatgtctccgaca

SEQ ID NO: 506802 - DNA, 30 bp, Artificial Sequence
  Synthetic oligonucleotide
aacgataagtagtaccgtgtacgagcgaca

SEQ ID NO: 506803 - DNA, 30 bp, Artificial Sequence
  Synthetic oligonucleotide
gcgcaaggagggatgaaataaaacgcgaca

SEQ ID NO: 506804 - DNA, 30 bp, Artificial Sequence
  Synthetic oligonucleotide
tgtcagggggtggaataagaggccgcgaca

SEQ ID NO: 506805 - DNA, 30 bp, Artificial Sequence
  Synthetic oligonucleotide
gttggttccagctttgcaccgcgggcgaca

SEQ ID NO: 506806 - DNA, 30 bp, Artificial Sequence
  Synthetic oligonucleotide
ctgtgtgcccggtctgggacgtgggcgaca

SEQ ID NO: 506807 - DNA, 30 bp, Artificial Sequence
  Synthetic oligonucleotide
cccgcttgagctggggttatagcctcgaca

SEQ ID NO: 506808 - DNA, 31 bp, Artificial Sequence
  Synthetic oligonucleotide
acgtgacttagaatccctccaggtctcgaca

SEQ ID NO: 506809 - DNA, 30 bp, Artificial Sequence
  Synthetic oligonucleotide
ccccggtccccgaagcttcgattctcgaca

SEQ ID NO: 506810 - DNA, 30 bp, Artificial Sequence
  Synthetic oligonucleotide
ttcgtcccttaggtttatatgacgtcgaca

SEQ ID NO: 506811 - DNA, 30 bp, Artificial Sequence
  Synthetic oligonucleotide
ggagccaaggcgacatagagtaggtcgaca

SEQ ID NO: 506812 - DNA, 30 bp, Artificial Sequence
  Synthetic oligonucleotide
aatcgtattaggctctatgatgggtcgaca

SEQ ID NO: 506813 - DNA, 30 bp, Artificial Sequence
  Synthetic oligonucleotide
tccgttgtcgatttctaataaaattcgaca

SEQ ID NO: 506814 - DNA, 30 bp, Artificial Sequence
  Synthetic oligonucleotide
aatacagactgctcttacgggttttcgaca

SEQ ID NO: 506815 - DNA, 30 bp, Artificial Sequence
  Synthetic oligonucleotide
gttaagataggacaggcctcaaacaggaca

SEQ ID NO: 506816 - DNA, 30 bp, Artificial Sequence
  Synthetic oligonucleotide
cctcattcgtatcaacccacagtgaggaca

SEQ ID NO: 506817 - DNA, 30 bp, Artificial Sequence
  Synthetic oligonucleotide
ttctgagcgttccaatagtctactaggaca

SEQ ID NO: 506818 - DNA, 30 bp, Artificial Sequence
  Synthetic oligonucleotide
taagtcggcgggcttattaggcttaggaca

SEQ ID NO: 506819 - DNA, 30 bp, Artificial Sequence
  Synthetic oligonucleotide
gggggctcttggacggttaggaaacggaca

SEQ ID NO: 506820 - DNA, 30 bp, Artificial Sequence
  Synthetic oligonucleotide
tgcatatgcctctgttgagggagacggaca

SEQ ID NO: 506821 - DNA, 30 bp, Artificial Sequence
  Synthetic oligonucleotide
tgacgcgcgcgcgcaggtggcgtacggaca

SEQ ID NO: 506822 - DNA, 30 bp, Artificial Sequence
  Synthetic oligonucleotide
aagatcagtaaagttagacatcaccggaca

SEQ ID NO: 506823 - DNA, 30 bp, Artificial Sequence
  Synthetic oligonucleotide
gttttgctcttaccagcctcgtagcggaca

SEQ ID NO: 506824 - DNA, 30 bp, Artificial Sequence
  Synthetic oligonucleotide
tcagaaaatagttcttttttagatcggaca

SEQ ID NO: 506825 - DNA, 30 bp, Artificial Sequence
  Synthetic oligonucleotide
aaattccgaatatctcagtagggtcggaca

SEQ ID NO: 506826 - DNA, 30 bp, Artificial Sequence
  Synthetic oligonucleotide
tgcgccaagtactggggcaaagttcggaca

SEQ ID NO: 506827 - DNA, 30 bp, Artificial Sequence
  Synthetic oligonucleotide
gacgagaggatcaaagaatactccgggaca

SEQ ID NO: 506828 - DNA, 30 bp, Artificial Sequence
  Synthetic oligonucleotide
catgcctggttacggatgacggctgggaca

SEQ ID NO: 506829 - DNA, 30 bp, Artificial Sequence
  Synthetic oligonucleotide
tcatctatgtatgccatgttgcttgggaca

SEQ ID NO: 506830 - DNA, 30 bp, Artificial Sequence
  Synthetic oligonucleotide
gtatttttctctgtacatcaagcatggaca

SEQ ID NO: 506831 - DNA, 30 bp, Artificial Sequence
  Synthetic oligonucleotide
gtacccagaaatattactcactcatggaca

SEQ ID NO: 506832 - DNA, 30 bp, Artificial Sequence
  Synthetic oligonucleotide
tcgcgccccccaccggacgttggatggaca

SEQ ID NO: 506833 - DNA, 30 bp, Artificial Sequence
  Synthetic oligonucleotide
cgtaaattgcgaatcatatcaacctggaca

SEQ ID NO: 506834 - DNA, 30 bp, Artificial Sequence
  Synthetic oligonucleotide
acccagtcttgtcaataagtcacctggaca

SEQ ID NO: 506835 - DNA, 30 bp, Artificial Sequence
  Synthetic oligonucleotide
tgatacagttggctagacgggtcctggaca

SEQ ID NO: 506836 - DNA, 30 bp, Artificial Sequence
  Synthetic oligonucleotide
attgcgctcttactggattagttctggaca

SEQ ID NO: 506837 - DNA, 30 bp, Artificial Sequence
  Synthetic oligonucleotide
gaggaagagaatcgcatattgctgtggaca

SEQ ID NO: 506838 - DNA, 30 bp, Artificial Sequence
  Synthetic oligonucleotide
gaggaagagaatctcatattgctgtggaca

SEQ ID NO: 506839 - DNA, 30 bp, Artificial Sequence
  Synthetic oligonucleotide
tctaagtaggctgttgcgatgccttggaca

SEQ ID NO: 506840 - DNA, 30 bp, Artificial Sequence
  Synthetic oligonucleotide
aaacaggagctacagctgggagaaatgaca

SEQ ID NO: 506841 - DNA, 30 bp, Artificial Sequence
  Synthetic oligonucleotide
aatttttacgctttcactgtgtccatgaca

SEQ ID NO: 506842 - DNA, 30 bp, Artificial Sequence
  Synthetic oligonucleotide
agcactccacgacccgtgcgatggatgaca

SEQ ID NO: 506843 - DNA, 30 bp, Artificial Sequence
  Synthetic oligonucleotide
tcacagcctgtgataatgggttggatgaca

SEQ ID NO: 506844 - DNA, 30 bp, Artificial Sequence
  Synthetic oligonucleotide
actaggacgcagccgcaccccgtgatgaca

SEQ ID NO: 506845 - DNA, 30 bp, Artificial Sequence
  Synthetic oligonucleotide
atcttgcccctaagcggcacgattatgaca

SEQ ID NO: 506846 - DNA, 30 bp, Artificial Sequence
  Synthetic oligonucleotide
cgaagtatgcttaaatgtccgcttatgaca

SEQ ID NO: 506847 - DNA, 30 bp, Artificial Sequence
  Synthetic oligonucleotide
gaagttattaactttggcatatacctgaca

SEQ ID NO: 506848 - DNA, 30 bp, Artificial Sequence
  Synthetic oligonucleotide
aatcctccttagaggggtaatgcgctgaca

SEQ ID NO: 506849 - DNA, 30 bp, Artificial Sequence
  Synthetic oligonucleotide
gtttgacgatattatggcactaggctgaca

SEQ ID NO: 506850 - DNA, 30 bp, Artificial Sequence
  Synthetic oligonucleotide
tttaaaaaattcagattgctcgggctgaca

SEQ ID NO: 506851 - DNA, 30 bp, Artificial Sequence
  Synthetic oligonucleotide
tttagattgacgagcaagcagtggctgaca

SEQ ID NO: 506852 - DNA, 30 bp, Artificial Sequence
  Synthetic oligonucleotide
ttatgttgcaatatcatattccctctgaca

SEQ ID NO: 506853 - DNA, 30 bp, Artificial Sequence
  Synthetic oligonucleotide
ttctagaacgcaaagctaggtcaagtgaca

SEQ ID NO: 506854 - DNA, 30 bp, Artificial Sequence
  Synthetic oligonucleotide
cggcacgaatgtaagagtaacgcagtgaca

SEQ ID NO: 506855 - DNA, 30 bp, Artificial Sequence
  Synthetic oligonucleotide
cctaccctgtctatggggaatggagtgaca

SEQ ID NO: 506856 - DNA, 30 bp, Artificial Sequence
  Synthetic oligonucleotide
gtcccacgctgtattgtgaattgcgtgaca

SEQ ID NO: 506857 - DNA, 30 bp, Artificial Sequence
  Synthetic oligonucleotide
cgaaactttaccttatatatcgaggtgaca

SEQ ID NO: 506858 - DNA, 30 bp, Artificial Sequence
  Synthetic oligonucleotide
ctacgaggtctctttggggacactgtgaca

SEQ ID NO: 506859 - DNA, 30 bp, Artificial Sequence
  Synthetic oligonucleotide
gctaaatttattgaatatgtttaattgaca

SEQ ID NO: 506860 - DNA, 30 bp, Artificial Sequence
  Synthetic oligonucleotide
tttagcaagggatgaaactagttcttgaca

SEQ ID NO: 506861 - DNA, 30 bp, Artificial Sequence
  Synthetic oligonucleotide
taggacacttttgggggtgagctgttgaca

SEQ ID NO: 506862 - DNA, 30 bp, Artificial Sequence
  Synthetic oligonucleotide
agaaacaggccgaagtttagcaatttgaca

SEQ ID NO: 506863 - DNA, 30 bp, Artificial Sequence
  Synthetic oligonucleotide
tagtacgaaaagggtgcgccggatttgaca

SEQ ID NO: 506864 - DNA, 30 bp, Artificial Sequence
  Synthetic oligonucleotide
gttggacaaatcggggagcaataaaataca

SEQ ID NO: 506865 - DNA, 30 bp, Artificial Sequence
  Synthetic oligonucleotide
aactatgctgtgaatgtcacagcaaataca

SEQ ID NO: 506866 - DNA, 30 bp, Artificial Sequence
  Synthetic oligonucleotide
aatgcaatggagactaagcattacaataca

SEQ ID NO: 506867 - DNA, 30 bp, Artificial Sequence
  Synthetic oligonucleotide
tgaggatatcatgactctacccccaataca

SEQ ID NO: 506868 - DNA, 30 bp, Artificial Sequence
  Synthetic oligonucleotide
tgggcggcatccttatgtgccgccaataca

SEQ ID NO: 506869 - DNA, 30 bp, Artificial Sequence
  Synthetic oligonucleotide
cccagtgaccgtataagtgggaggaataca

SEQ ID NO: 506870 - DNA, 29 bp, Artificial Sequence
  Synthetic oligonucleotide
tcattctgaataccgcgaaatggaataca

SEQ ID NO: 506871 - DNA, 31 bp, Artificial Sequence
  Synthetic oligonucleotide
ggaaattttggtaaatgtcaaacgccataca

SEQ ID NO: 506872 - DNA, 30 bp, Artificial Sequence
  Synthetic oligonucleotide
tggtgcttcgctgatggtctccgccataca

SEQ ID NO: 506873 - DNA, 30 bp, Artificial Sequence
  Synthetic oligonucleotide
tagaacggactttagatggccgagcataca

SEQ ID NO: 506874 - DNA, 30 bp, Artificial Sequence
  Synthetic oligonucleotide
gatgttactcatggctaagacgcgcataca

SEQ ID NO: 506875 - DNA, 29 bp, Artificial Sequence
  Synthetic oligonucleotide
agagcgcagtaggttacgtgctgcataca

SEQ ID NO: 506876 - DNA, 30 bp, Artificial Sequence
  Synthetic oligonucleotide
gctccagactagacgggtcagcgtcataca

SEQ ID NO: 506877 - DNA, 30 bp, Artificial Sequence
  Synthetic oligonucleotide
acacaaattgcagagggagggcaagataca

SEQ ID NO: 506878 - DNA, 30 bp, Artificial Sequence
  Synthetic oligonucleotide
tgataggcaagcatcttgaacgcagataca

SEQ ID NO: 506879 - DNA, 30 bp, Artificial Sequence
  Synthetic oligonucleotide
aactctcactggacgcttttgagagataca

SEQ ID NO: 506880 - DNA, 30 bp, Artificial Sequence
  Synthetic oligonucleotide
tttacatgaagagacctttggcaggataca

SEQ ID NO: 506881 - DNA, 30 bp, Artificial Sequence
  Synthetic oligonucleotide
ccgcaggtgaaatctttcccagtatataca

SEQ ID NO: 506882 - DNA, 30 bp, Artificial Sequence
  Synthetic oligonucleotide
ggccggctccagaagacaacgaattataca

SEQ ID NO: 506883 - DNA, 30 bp, Artificial Sequence
  Synthetic oligonucleotide
tgactctaccaattcaggcaatattataca

SEQ ID NO: 506884 - DNA, 30 bp, Artificial Sequence
  Synthetic oligonucleotide
gccaggcctcaatgcagataggttactaca

SEQ ID NO: 506885 - DNA, 30 bp, Artificial Sequence
  Synthetic oligonucleotide
aaaagcctgatactattttttgttactaca

SEQ ID NO: 506886 - DNA, 30 bp, Artificial Sequence
  Synthetic oligonucleotide
ttcggggactaactcagcaagttgcctaca

SEQ ID NO: 506887 - DNA, 30 bp, Artificial Sequence
  Synthetic oligonucleotide
gtatatattctggagtgaatcactcctaca

SEQ ID NO: 506888 - DNA, 30 bp, Artificial Sequence
  Synthetic oligonucleotide
caagaagttatcggagcaagtaaagctaca

SEQ ID NO: 506889 - DNA, 30 bp, Artificial Sequence
  Synthetic oligonucleotide
gtttgcaggtgagactcccctcgagctaca

SEQ ID NO: 506890 - DNA, 30 bp, Artificial Sequence
  Synthetic oligonucleotide
ctctgacacgactcttcttatttagctaca

SEQ ID NO: 506891 - DNA, 30 bp, Artificial Sequence
  Synthetic oligonucleotide
cgaatccgatttccgccgcgtaccgctaca

SEQ ID NO: 506892 - DNA, 30 bp, Artificial Sequence
  Synthetic oligonucleotide
agagctcgtttattttgtttattcgctaca

SEQ ID NO: 506893 - DNA, 30 bp, Artificial Sequence
  Synthetic oligonucleotide
catcgttttaaggaacccaaaccggctaca

SEQ ID NO: 506894 - DNA, 30 bp, Artificial Sequence
  Synthetic oligonucleotide
cccgctccacaaaactgcgcgtgggctaca

SEQ ID NO: 506895 - DNA, 30 bp, Artificial Sequence
  Synthetic oligonucleotide
tataacagtgggtataagccaccatctaca

SEQ ID NO: 506896 - DNA, 30 bp, Artificial Sequence
  Synthetic oligonucleotide
cgttcaatcacctagtagttacgatctaca

SEQ ID NO: 506897 - DNA, 30 bp, Artificial Sequence
  Synthetic oligonucleotide
acgggcctatcagggatgttcgtatctaca

SEQ ID NO: 506898 - DNA, 30 bp, Artificial Sequence
  Synthetic oligonucleotide
gtattcgttcgtgaatcagaaaactctaca

SEQ ID NO: 506899 - DNA, 31 bp, Artificial Sequence
  Synthetic oligonucleotide
tgtcaccagagatgttggcgagtactctaca

SEQ ID NO: 506900 - DNA, 30 bp, Artificial Sequence
  Synthetic oligonucleotide
catagaacgcacccaactattggctctaca

SEQ ID NO: 506901 - DNA, 30 bp, Artificial Sequence
  Synthetic oligonucleotide
ggcacgcaatgctccttagattgctctaca

SEQ ID NO: 506902 - DNA, 30 bp, Artificial Sequence
  Synthetic oligonucleotide
gtcacttccttagcaattgcaaggtctaca

SEQ ID NO: 506903 - DNA, 30 bp, Artificial Sequence
  Synthetic oligonucleotide
tttacttaggtactacttagcgtgtctaca

SEQ ID NO: 506904 - DNA, 30 bp, Artificial Sequence
  Synthetic oligonucleotide
gaggttgcgttatacagatgactttctaca

SEQ ID NO: 506905 - DNA, 30 bp, Artificial Sequence
  Synthetic oligonucleotide
tcaattagttggggcccacgcttttctaca

SEQ ID NO: 506906 - DNA, 30 bp, Artificial Sequence
  Synthetic oligonucleotide
tctgatccctcattgtaacgcacaagtaca

SEQ ID NO: 506907 - DNA, 30 bp, Artificial Sequence
  Synthetic oligonucleotide
ttttgaactgctaggctaatcagaagtaca

SEQ ID NO: 506908 - DNA, 30 bp, Artificial Sequence
  Synthetic oligonucleotide
ttgaatgttcttaatggaaatttaagtaca

SEQ ID NO: 506909 - DNA, 30 bp, Artificial Sequence
  Synthetic oligonucleotide
gctgcgcctgcggaggaatcggtcagtaca

SEQ ID NO: 506910 - DNA, 30 bp, Artificial Sequence
  Synthetic oligonucleotide
cagctatgggtaatggcggtatcgagtaca

SEQ ID NO: 506911 - DNA, 30 bp, Artificial Sequence
  Synthetic oligonucleotide
ctcctaggttcgacgcatgacccacgtaca

SEQ ID NO: 506912 - DNA, 30 bp, Artificial Sequence
  Synthetic oligonucleotide
cgctggtgggtactcttagtgtcccgtaca

SEQ ID NO: 506913 - DNA, 30 bp, Artificial Sequence
  Synthetic oligonucleotide
gagaaattgtcctccctcttgcagcgtaca

SEQ ID NO: 506914 - DNA, 30 bp, Artificial Sequence
  Synthetic oligonucleotide
ttcaattttgggagtctgagcgcgcgtaca

SEQ ID NO: 506915 - DNA, 30 bp, Artificial Sequence
  Synthetic oligonucleotide
tccacaatcgtgtgtagcagtgcgcgtaca

SEQ ID NO: 506916 - DNA, 30 bp, Artificial Sequence
  Synthetic oligonucleotide
ccataggctattattaaatcttggcgtaca

SEQ ID NO: 506917 - DNA, 30 bp, Artificial Sequence
  Synthetic oligonucleotide
tttgagttttgcatacggaccattcgtaca

SEQ ID NO: 506918 - DNA, 30 bp, Artificial Sequence
  Synthetic oligonucleotide
tctgtaaacatctttaaggagaagggtaca

SEQ ID NO: 506919 - DNA, 30 bp, Artificial Sequence
  Synthetic oligonucleotide
gacagccatgtcagttacgcgccgggtaca

SEQ ID NO: 506920 - DNA, 30 bp, Artificial Sequence
  Synthetic oligonucleotide
tgtctcccgggtcacccaggtacatgtaca

SEQ ID NO: 506921 - DNA, 30 bp, Artificial Sequence
  Synthetic oligonucleotide
tgggagatgcaaagatgtaaaccatgtaca

SEQ ID NO: 506922 - DNA, 30 bp, Artificial Sequence
  Synthetic oligonucleotide
tccaagtcggccatttgatacgcctgtaca

SEQ ID NO: 506923 - DNA, 30 bp, Artificial Sequence
  Synthetic oligonucleotide
gaaggaacaagcgctttaccaccttgtaca

SEQ ID NO: 506924 - DNA, 30 bp, Artificial Sequence
  Synthetic oligonucleotide
actaatggccccttacgatcgggttgtaca

SEQ ID NO: 506925 - DNA, 30 bp, Artificial Sequence
  Synthetic oligonucleotide
gtgtttagtaataaggggacgctttgtaca

SEQ ID NO: 506926 - DNA, 30 bp, Artificial Sequence
  Synthetic oligonucleotide
gtacagactgagagaaggctaacaattaca

SEQ ID NO: 506927 - DNA, 30 bp, Artificial Sequence
  Synthetic oligonucleotide
gattgactgtcacgggtagcgataattaca

SEQ ID NO: 506928 - DNA, 30 bp, Artificial Sequence
  Synthetic oligonucleotide
aggtctgccctatatgcgcaggtaattaca

SEQ ID NO: 506929 - DNA, 30 bp, Artificial Sequence
  Synthetic oligonucleotide
cgtaccattaagaagcaccagaacattaca

SEQ ID NO: 506930 - DNA, 30 bp, Artificial Sequence
  Synthetic oligonucleotide
gggcgttccctcacgggtgtcagcattaca

SEQ ID NO: 506931 - DNA, 30 bp, Artificial Sequence
  Synthetic oligonucleotide
ccaactgggtaaagttggggacagattaca

SEQ ID NO: 506932 - DNA, 30 bp, Artificial Sequence
  Synthetic oligonucleotide
gggcaataagaggactaaagtaggattaca

SEQ ID NO: 506933 - DNA, 30 bp, Artificial Sequence
  Synthetic oligonucleotide
catggtaggcttaagatgtacaatattaca

SEQ ID NO: 506934 - DNA, 30 bp, Artificial Sequence
  Synthetic oligonucleotide
aagtgtaggaagcttccatgggatattaca

SEQ ID NO: 506935 - DNA, 30 bp, Artificial Sequence
  Synthetic oligonucleotide
ccgtttgtcttggtctatctgagtattaca

SEQ ID NO: 506936 - DNA, 30 bp, Artificial Sequence
  Synthetic oligonucleotide
aaatgcttattggttgacatagttattaca

SEQ ID NO: 506937 - DNA, 30 bp, Artificial Sequence
  Synthetic oligonucleotide
gaaaaactttcgcatggctggcgacttaca

SEQ ID NO: 506938 - DNA, 30 bp, Artificial Sequence
  Synthetic oligonucleotide
attttgcccaggtttgaacgcaaccttaca

SEQ ID NO: 506939 - DNA, 30 bp, Artificial Sequence
  Synthetic oligonucleotide
ggcgactatagcttgttaaggtaccttaca

SEQ ID NO: 506940 - DNA, 30 bp, Artificial Sequence
  Synthetic oligonucleotide
gatctggaagaagcatgttgcagccttaca

SEQ ID NO: 506941 - DNA, 30 bp, Artificial Sequence
  Synthetic oligonucleotide
ctagcccagccggaatacgtagtccttaca

SEQ ID NO: 506942 - DNA, 30 bp, Artificial Sequence
  Synthetic oligonucleotide
cagtggcaagactcttcacggtatcttaca

SEQ ID NO: 506943 - DNA, 30 bp, Artificial Sequence
  Synthetic oligonucleotide
aactctacacttgtgaaaccctctcttaca

SEQ ID NO: 506944 - DNA, 30 bp, Artificial Sequence
  Synthetic oligonucleotide
aagcaggtgctgcggagataatttcttaca

SEQ ID NO: 506945 - DNA, 30 bp, Artificial Sequence
  Synthetic oligonucleotide
acaagccacatttggctaaactgagttaca

SEQ ID NO: 506946 - DNA, 30 bp, Artificial Sequence
  Synthetic oligonucleotide
cgcgggcaggattgaatgctcggcgttaca

SEQ ID NO: 506947 - DNA, 30 bp, Artificial Sequence
  Synthetic oligonucleotide
tgtgggcgccattgtaatccgttggttaca

SEQ ID NO: 506948 - DNA, 30 bp, Artificial Sequence
  Synthetic oligonucleotide
cccgtcctaaggaaagtagccgttgttaca

SEQ ID NO: 506949 - DNA, 30 bp, Artificial Sequence
  Synthetic oligonucleotide
gtaacaaagatcgtcagtccatcatttaca

SEQ ID NO: 506950 - DNA, 30 bp, Artificial Sequence
  Synthetic oligonucleotide
atatagccaacgcttccgatactatttaca

SEQ ID NO: 506951 - DNA, 30 bp, Artificial Sequence
  Synthetic oligonucleotide
gatatgggacgttcaaggcccacctttaca

SEQ ID NO: 506952 - DNA, 30 bp, Artificial Sequence
  Synthetic oligonucleotide
ttatattcaaactcagttggtgcctttaca

SEQ ID NO: 506953 - DNA, 30 bp, Artificial Sequence
  Synthetic oligonucleotide
cgtgattgctctaagacgctgcgctttaca

SEQ ID NO: 506954 - DNA, 30 bp, Artificial Sequence
  Synthetic oligonucleotide
ttggcttcctatcatgtatagttctttaca

SEQ ID NO: 506955 - DNA, 30 bp, Artificial Sequence
  Synthetic oligonucleotide
tgactctgcttgtaccgagatgattttaca

SEQ ID NO: 506956 - DNA, 30 bp, Artificial Sequence
  Synthetic oligonucleotide
gctcccctatttctctgttatccttttaca

SEQ ID NO: 506957 - DNA, 30 bp, Artificial Sequence
  Synthetic oligonucleotide
acagggcgcagccttattaacagttttaca

SEQ ID NO: 506958 - DNA, 30 bp, Artificial Sequence
  Synthetic oligonucleotide
attcgccacccatgacgggtaatttttaca

SEQ ID NO: 506959 - DNA, 30 bp, Artificial Sequence
  Synthetic oligonucleotide
cttactgtagctgaaatgaggctttttaca

SEQ ID NO: 506960 - DNA, 30 bp, Artificial Sequence
  Synthetic oligonucleotide
aaattctggccgagctatcgtcaaaaacca

SEQ ID NO: 506961 - DNA, 30 bp, Artificial Sequence
  Synthetic oligonucleotide
aatctagcgcgagtgttggaacagaaacca

SEQ ID NO: 506962 - DNA, 30 bp, Artificial Sequence
  Synthetic oligonucleotide
tgagtgaatttttaagggcccgagaaacca

SEQ ID NO: 506963 - DNA, 30 bp, Artificial Sequence
  Synthetic oligonucleotide
tcgtgcgccaatattgcagaacataaacca

SEQ ID NO: 506964 - DNA, 30 bp, Artificial Sequence
  Synthetic oligonucleotide
cgaactcagggcctatggtacggtaaacca

SEQ ID NO: 506965 - DNA, 30 bp, Artificial Sequence
  Synthetic oligonucleotide
accgtccaagagagcgggggtagacaacca

SEQ ID NO: 506966 - DNA, 30 bp, Artificial Sequence
  Synthetic oligonucleotide
gtataggttgtactcgtagtgaatcaacca

SEQ ID NO: 506967 - DNA, 30 bp, Artificial Sequence
  Synthetic oligonucleotide
tatggcgtcggtagggtagaaactcaacca

SEQ ID NO: 506968 - DNA, 30 bp, Artificial Sequence
  Synthetic oligonucleotide
ttacggattggaaaataatgtacagaacca

SEQ ID NO: 506969 - DNA, 30 bp, Artificial Sequence
  Synthetic oligonucleotide
cggttctcaagtgggcgaaagtcagaacca

SEQ ID NO: 506970 - DNA, 30 bp, Artificial Sequence
  Synthetic oligonucleotide
cccggaagaacgcacatgctaatagaacca

SEQ ID NO: 506971 - DNA, 30 bp, Artificial Sequence
  Synthetic oligonucleotide
gacgttcgcaccccgactccgtgcgaacca

SEQ ID NO: 506972 - DNA, 30 bp, Artificial Sequence
  Synthetic oligonucleotide
gcgagtcgaacttgagcgtcagtcgaacca

SEQ ID NO: 506973 - DNA, 30 bp, Artificial Sequence
  Synthetic oligonucleotide
ggaggagaggtaaggaacacaacggaacca

SEQ ID NO: 506974 - DNA, 30 bp, Artificial Sequence
  Synthetic oligonucleotide
gtctttgactcgatattggtgccggaacca

SEQ ID NO: 506975 - DNA, 30 bp, Artificial Sequence
  Synthetic oligonucleotide
ttacatgcttgcgtagattagcgataacca

SEQ ID NO: 506976 - DNA, 30 bp, Artificial Sequence
  Synthetic oligonucleotide
catggtttattcgccgctttcagctaacca

SEQ ID NO: 506977 - DNA, 30 bp, Artificial Sequence
  Synthetic oligonucleotide
atgtatctcataaacgaattgtgttaacca

SEQ ID NO: 506978 - DNA, 30 bp, Artificial Sequence
  Synthetic oligonucleotide
tgtggatgtttagttatcccatgcacacca

SEQ ID NO: 506979 - DNA, 30 bp, Artificial Sequence
  Synthetic oligonucleotide
gacgtagtcagtaaagaacctaggacacca

SEQ ID NO: 506980 - DNA, 30 bp, Artificial Sequence
  Synthetic oligonucleotide
tcagtttttaactgtacagttcggacacca

SEQ ID NO: 506981 - DNA, 30 bp, Artificial Sequence
  Synthetic oligonucleotide
gcaattccagttctacttcttcgtacacca

SEQ ID NO: 506982 - DNA, 30 bp, Artificial Sequence
  Synthetic oligonucleotide
atcagcccggaaaggaatctctttacacca

SEQ ID NO: 506983 - DNA, 30 bp, Artificial Sequence
  Synthetic oligonucleotide
ctcttcacgtaacggcgatataacccacca

SEQ ID NO: 506984 - DNA, 30 bp, Artificial Sequence
  Synthetic oligonucleotide
tagccagggttgccccgcgggtctccacca

SEQ ID NO: 506985 - DNA, 30 bp, Artificial Sequence
  Synthetic oligonucleotide
aatatattactcctataaatgtgtccacca

SEQ ID NO: 506986 - DNA, 30 bp, Artificial Sequence
  Synthetic oligonucleotide
ggaaactaggggatacaaacgacagcacca

SEQ ID NO: 506987 - DNA, 30 bp, Artificial Sequence
  Synthetic oligonucleotide
tctctacatccttgaattaaattagcacca

SEQ ID NO: 506988 - DNA, 30 bp, Artificial Sequence
  Synthetic oligonucleotide
cttcctcaagtaagatctatatacgcacca

SEQ ID NO: 506989 - DNA, 30 bp, Artificial Sequence
  Synthetic oligonucleotide
atgggatggacgtatacccagtgtgcacca

SEQ ID NO: 506990 - DNA, 30 bp, Artificial Sequence
  Synthetic oligonucleotide
atagacataaaaatctgtccgatgtcacca

SEQ ID NO: 506991 - DNA, 30 bp, Artificial Sequence
  Synthetic oligonucleotide
acatgttcttcccttaagggagattcacca

SEQ ID NO: 506992 - DNA, 30 bp, Artificial Sequence
  Synthetic oligonucleotide
agcatgggattaaacgcagcgggttcacca

SEQ ID NO: 506993 - DNA, 30 bp, Artificial Sequence
  Synthetic oligonucleotide
actttctgtggatgtgaaagggcgagacca

SEQ ID NO: 506994 - DNA, 30 bp, Artificial Sequence
  Synthetic oligonucleotide
tttaggagctgtgaaacccatttgagacca

SEQ ID NO: 506995 - DNA, 30 bp, Artificial Sequence
  Synthetic oligonucleotide
gtgctaatcgtctagtaggtttatagacca

SEQ ID NO: 506996 - DNA, 30 bp, Artificial Sequence
  Synthetic oligonucleotide
ggtgttctcgcgggacctcgatttagacca

SEQ ID NO: 506997 - DNA, 30 bp, Artificial Sequence
  Synthetic oligonucleotide
ctgcctttctcgaaattttccgaccgacca

SEQ ID NO: 506998 - DNA, 30 bp, Artificial Sequence
  Synthetic oligonucleotide
tttcagtgcccatattttacgtagcgacca

SEQ ID NO: 506999 - DNA, 30 bp, Artificial Sequence
  Synthetic oligonucleotide
acgagcgctgctccgtgtcattatcgacca

SEQ ID NO: 507000 - DNA, 30 bp, Artificial Sequence
  Synthetic oligonucleotide
ctattggccgcagtattaaacattcgacca

SEQ ID NO: 507001 - DNA, 30 bp, Artificial Sequence
  Synthetic oligonucleotide
gccttttgttttgttccgaagggaggacca

SEQ ID NO: 507002 - DNA, 30 bp, Artificial Sequence
  Synthetic oligonucleotide
caaacatgacatgttctatatgtcggacca

SEQ ID NO: 507003 - DNA, 30 bp, Artificial Sequence
  Synthetic oligonucleotide
gtcatactctgcagcagcagtgcgggacca

SEQ ID NO: 507004 - DNA, 30 bp, Artificial Sequence
  Synthetic oligonucleotide
tgggttcaaaacctcgagaatgcatgacca

SEQ ID NO: 507005 - DNA, 30 bp, Artificial Sequence
  Synthetic oligonucleotide
ggtgctatacctggggggcatatatgacca

SEQ ID NO: 507006 - DNA, 30 bp, Artificial Sequence
  Synthetic oligonucleotide
atggtcgggagcaggatgaagacctgacca

SEQ ID NO: 507007 - DNA, 30 bp, Artificial Sequence
  Synthetic oligonucleotide
ctttaaaattatatgtgctacgtctgacca

SEQ ID NO: 507008 - DNA, 30 bp, Artificial Sequence
  Synthetic oligonucleotide
aataaaactgggagcgttattcagtgacca

SEQ ID NO: 507009 - DNA, 30 bp, Artificial Sequence
  Synthetic oligonucleotide
aagtttttcgtcctggaatcctcgtgacca

SEQ ID NO: 507010 - DNA, 30 bp, Artificial Sequence
  Synthetic oligonucleotide
tcatcttatgttatgtctactttgtgacca

SEQ ID NO: 507011 - DNA, 30 bp, Artificial Sequence
  Synthetic oligonucleotide
tatgcgtatggattcggtgtcaaaatacca

SEQ ID NO: 507012 - DNA, 30 bp, Artificial Sequence
  Synthetic oligonucleotide
taactcccccatgcgctcgggtaaatacca

SEQ ID NO: 507013 - DNA, 30 bp, Artificial Sequence
  Synthetic oligonucleotide
cgttacgcatttcgtcgctggctaatacca

SEQ ID NO: 507014 - DNA, 30 bp, Artificial Sequence
  Synthetic oligonucleotide
gacttaagtgaactcgcgggtacgatacca

SEQ ID NO: 507015 - DNA, 30 bp, Artificial Sequence
  Synthetic oligonucleotide
tttcactcctccctacgctacgggatacca

SEQ ID NO: 507016 - DNA, 30 bp, Artificial Sequence
  Synthetic oligonucleotide
tcggacgactgtgcaaattcgctgatacca

SEQ ID NO: 507017 - DNA, 30 bp, Artificial Sequence
  Synthetic oligonucleotide
tacccctttgtggccaaagaggtactacca

SEQ ID NO: 507018 - DNA, 30 bp, Artificial Sequence
  Synthetic oligonucleotide
aacatttcggagtcatggccgtacctacca

SEQ ID NO: 507019 - DNA, 30 bp, Artificial Sequence
  Synthetic oligonucleotide
gttcaaatccacgctccacgcaccctacca

SEQ ID NO: 507020 - DNA, 30 bp, Artificial Sequence
  Synthetic oligonucleotide
ggggaagaagtaataaattgcgagctacca

SEQ ID NO: 507021 - DNA, 30 bp, Artificial Sequence
  Synthetic oligonucleotide
actttttatatcattggtgtcattctacca

SEQ ID NO: 507022 - DNA, 30 bp, Artificial Sequence
  Synthetic oligonucleotide
gaattaacgcgtcaacgtaattttctacca

SEQ ID NO: 507023 - DNA, 30 bp, Artificial Sequence
  Synthetic oligonucleotide
ctttatcgatcagtttttgatgcagtacca

SEQ ID NO: 507024 - DNA, 30 bp, Artificial Sequence
  Synthetic oligonucleotide
gttcttcgacgttacccattctacgtacca

SEQ ID NO: 507025 - DNA, 30 bp, Artificial Sequence
  Synthetic oligonucleotide
gttcagcaccaggggtttctgttggtacca

SEQ ID NO: 507026 - DNA, 30 bp, Artificial Sequence
  Synthetic oligonucleotide
aggctagcatatttagctattactgtacca

SEQ ID NO: 507027 - DNA, 30 bp, Artificial Sequence
  Synthetic oligonucleotide
ccgccatggccagaatcccattctgtacca

SEQ ID NO: 507028 - DNA, 30 bp, Artificial Sequence
  Synthetic oligonucleotide
cgtgagggagcagaaactgtagttgtacca

SEQ ID NO: 507029 - DNA, 30 bp, Artificial Sequence
  Synthetic oligonucleotide
taaagcgtgaattgcgatatgtacttacca

SEQ ID NO: 507030 - DNA, 30 bp, Artificial Sequence
  Synthetic oligonucleotide
ttgatccgcaacaatcgtaataccttacca

SEQ ID NO: 507031 - DNA, 30 bp, Artificial Sequence
  Synthetic oligonucleotide
aattaataagccgtgttgctccgcttacca

SEQ ID NO: 507032 - DNA, 30 bp, Artificial Sequence
  Synthetic oligonucleotide
tccttttatcttcagaacatggtcttacca

SEQ ID NO: 507033 - DNA, 30 bp, Artificial Sequence
  Synthetic oligonucleotide
aaggttcgtggtatacacactggtttacca

SEQ ID NO: 507034 - DNA, 30 bp, Artificial Sequence
  Synthetic oligonucleotide
gttgagttgtgcgcatcccccaaaaaccca

SEQ ID NO: 507035 - DNA, 30 bp, Artificial Sequence
  Synthetic oligonucleotide
ggatgtccaatacccaagaatctaaaccca

SEQ ID NO: 507036 - DNA, 30 bp, Artificial Sequence
  Synthetic oligonucleotide
tgataagtacaattaccgatctgcaaccca

SEQ ID NO: 507037 - DNA, 30 bp, Artificial Sequence
  Synthetic oligonucleotide
ccgacgcatacgttctcttatgagaaccca

SEQ ID NO: 507038 - DNA, 30 bp, Artificial Sequence
  Synthetic oligonucleotide
tttacgagcgttgaggtcagcaggaaccca

SEQ ID NO: 507039 - DNA, 30 bp, Artificial Sequence
  Synthetic oligonucleotide
ctggaataggctagtagttgcaggaaccca

SEQ ID NO: 507040 - DNA, 31 bp, Artificial Sequence
  Synthetic oligonucleotide
tgcaagcggcggcaacttagaggtccaccca

SEQ ID NO: 507041 - DNA, 30 bp, Artificial Sequence
  Synthetic oligonucleotide
aaacatggtcttcgagcttttctagaccca

SEQ ID NO: 507042 - DNA, 30 bp, Artificial Sequence
  Synthetic oligonucleotide
cgacttattaggggtctatgtgtagaccca

SEQ ID NO: 507043 - DNA, 30 bp, Artificial Sequence
  Synthetic oligonucleotide
cttgaaatttaaaagggttttgacgaccca

SEQ ID NO: 507044 - DNA, 29 bp, Artificial Sequence
  Synthetic oligonucleotide
ggcgtcctgactttctgtcgaaggaccca

SEQ ID NO: 507045 - DNA, 30 bp, Artificial Sequence
  Synthetic oligonucleotide
ttgctcttgattaattgaagtcatgaccca

SEQ ID NO: 507046 - DNA, 30 bp, Artificial Sequence
  Synthetic oligonucleotide
gttcgcagcacggtctgaaaacgtgaccca

SEQ ID NO: 507047 - DNA, 30 bp, Artificial Sequence
  Synthetic oligonucleotide
ggaaatagcactctgacggtcagataccca

SEQ ID NO: 507048 - DNA, 30 bp, Artificial Sequence
  Synthetic oligonucleotide
gagttgagggtcgccgtatcgtgataccca

SEQ ID NO: 507049 - DNA, 30 bp, Artificial Sequence
  Synthetic oligonucleotide
ttattgtcgtaacaagggctgacctaccca

SEQ ID NO: 507050 - DNA, 30 bp, Artificial Sequence
  Synthetic oligonucleotide
cagagcacagagacacaatgggagtaccca

SEQ ID NO: 507051 - DNA, 30 bp, Artificial Sequence
  Synthetic oligonucleotide
acgacaagtatgggtgtaagccctacccca

SEQ ID NO: 507052 - DNA, 30 bp, Artificial Sequence
  Synthetic oligonucleotide
agcataagacgctagctgatgggtacccca

SEQ ID NO: 507053 - DNA, 30 bp, Artificial Sequence
  Synthetic oligonucleotide
agaaagctgggggtcacacttcttacccca

SEQ ID NO: 507054 - DNA, 30 bp, Artificial Sequence
  Synthetic oligonucleotide
actctagaatgcttctaaccgggaccccca

SEQ ID NO: 507055 - DNA, 30 bp, Artificial Sequence
  Synthetic oligonucleotide
ctttaccggcatgcatgcacggacgcccca

SEQ ID NO: 507056 - DNA, 30 bp, Artificial Sequence
  Synthetic oligonucleotide
gaaacttggtatatcgtttgcgtcgcccca

SEQ ID NO: 507057 - DNA, 30 bp, Artificial Sequence
  Synthetic oligonucleotide
actgggtccggtacgcagaatgctgcccca

SEQ ID NO: 507058 - DNA, 30 bp, Artificial Sequence
  Synthetic oligonucleotide
gtgcacgcgctagaagtcatgcgctcccca

SEQ ID NO: 507059 - DNA, 30 bp, Artificial Sequence
  Synthetic oligonucleotide
cgggaagatggttaggttccatcaagccca

SEQ ID NO: 507060 - DNA, 30 bp, Artificial Sequence
  Synthetic oligonucleotide
ggcgtccagcgcgcttctggtggaagccca

SEQ ID NO: 507061 - DNA, 30 bp, Artificial Sequence
  Synthetic oligonucleotide
cgcgaatccaatccgttaaacaagagccca

SEQ ID NO: 507062 - DNA, 30 bp, Artificial Sequence
  Synthetic oligonucleotide
cgcgaatcaactccgttaaacaagagccca

SEQ ID NO: 507063 - DNA, 30 bp, Artificial Sequence
  Synthetic oligonucleotide
gtaaattgggtcctacaagcgttacgccca

SEQ ID NO: 507064 - DNA, 31 bp, Artificial Sequence
  Synthetic oligonucleotide
aaatttgtgtaccttaacaggacaccgccca

SEQ ID NO: 507065 - DNA, 30 bp, Artificial Sequence
  Synthetic oligonucleotide
gacggtgacggaaaatgtatgccgcgccca

SEQ ID NO: 507066 - DNA, 30 bp, Artificial Sequence
  Synthetic oligonucleotide
ccccggctttcttgactagatcaaggccca

SEQ ID NO: 507067 - DNA, 30 bp, Artificial Sequence
  Synthetic oligonucleotide
tagaagcatccgttgggcacctcaggccca

SEQ ID NO: 507068 - DNA, 30 bp, Artificial Sequence
  Synthetic oligonucleotide
gttctgacgccttacgtagccggaggccca

SEQ ID NO: 507069 - DNA, 30 bp, Artificial Sequence
  Synthetic oligonucleotide
gttatgatgcagccgtgcgcgttcggccca

SEQ ID NO: 507070 - DNA, 30 bp, Artificial Sequence
  Synthetic oligonucleotide
tgcgggtttttgtctcacagcgatggccca

SEQ ID NO: 507071 - DNA, 30 bp, Artificial Sequence
  Synthetic oligonucleotide
tggtggtgacggggcgtatggctttgccca

SEQ ID NO: 507072 - DNA, 30 bp, Artificial Sequence
  Synthetic oligonucleotide
aatttatgcgtatacagtgaattttgccca

SEQ ID NO: 507073 - DNA, 30 bp, Artificial Sequence
  Synthetic oligonucleotide
tctgccatgggagttatgagtaaaatccca

SEQ ID NO: 507074 - DNA, 30 bp, Artificial Sequence
  Synthetic oligonucleotide
agcagttttgctctgttatgttaaatccca

SEQ ID NO: 507075 - DNA, 30 bp, Artificial Sequence
  Synthetic oligonucleotide
agatgactgtctgttgcgcctgcaatccca

SEQ ID NO: 507076 - DNA, 30 bp, Artificial Sequence
  Synthetic oligonucleotide
gaaaactccgtggatgtgaagtagatccca

SEQ ID NO: 507077 - DNA, 30 bp, Artificial Sequence
  Synthetic oligonucleotide
ggcgatcacgtctcgataggtcggatccca

SEQ ID NO: 507078 - DNA, 30 bp, Artificial Sequence
  Synthetic oligonucleotide
tatacatatttgtcttaatgatatatccca

SEQ ID NO: 507079 - DNA, 30 bp, Artificial Sequence
  Synthetic oligonucleotide
actttgtgtactatcagttaacgactccca

SEQ ID NO: 507080 - DNA, 30 bp, Artificial Sequence
  Synthetic oligonucleotide
gcctatagagtgatttcaagtgatctccca

SEQ ID NO: 507081 - DNA, 30 bp, Artificial Sequence
  Synthetic oligonucleotide
acggatagcagcacaggagaggctctccca

SEQ ID NO: 507082 - DNA, 30 bp, Artificial Sequence
  Synthetic oligonucleotide
cctgaagaagcgtgaagatcttgagtccca

SEQ ID NO: 507083 - DNA, 30 bp, Artificial Sequence
  Synthetic oligonucleotide
tcaccgccgggcttatttccatccgtccca

SEQ ID NO: 507084 - DNA, 30 bp, Artificial Sequence
  Synthetic oligonucleotide
agtctggcgaatggcgtctaacgcgtccca

SEQ ID NO: 507085 - DNA, 30 bp, Artificial Sequence
  Synthetic oligonucleotide
accctaattacatatatagtgtgtgtccca

SEQ ID NO: 507086 - DNA, 30 bp, Artificial Sequence
  Synthetic oligonucleotide
aagcatacaagcagctatatggaattccca

SEQ ID NO: 507087 - DNA, 30 bp, Artificial Sequence
  Synthetic oligonucleotide
attttattacgtttgatccccaccttccca

SEQ ID NO: 507088 - DNA, 30 bp, Artificial Sequence
  Synthetic oligonucleotide
gggcaacggaaggctcaatccgccttccca

SEQ ID NO: 507089 - DNA, 30 bp, Artificial Sequence
  Synthetic oligonucleotide
aacgacttggttatgatgaatgccttccca

SEQ ID NO: 507090 - DNA, 30 bp, Artificial Sequence
  Synthetic oligonucleotide
aatccatttttgtaatgcgtacctttccca

SEQ ID NO: 507091 - DNA, 31 bp, Artificial Sequence
  Synthetic oligonucleotide
ggtgtacacatttctggcattcattttccca

SEQ ID NO: 507092 - DNA, 30 bp, Artificial Sequence
  Synthetic oligonucleotide
ggagatggatttgcaactagctgaaagcca

SEQ ID NO: 507093 - DNA, 29 bp, Artificial Sequence
  Synthetic oligonucleotide
tattctaaataaaaacgaggtcgaagcca

SEQ ID NO: 507094 - DNA, 30 bp, Artificial Sequence
  Synthetic oligonucleotide
tttttatgttacctgacttctctgaagcca

SEQ ID NO: 507095 - DNA, 30 bp, Artificial Sequence
  Synthetic oligonucleotide
tttctaccgctcgaataaacggtgaagcca

SEQ ID NO: 507096 - DNA, 30 bp, Artificial Sequence
  Synthetic oligonucleotide
gaactgacggccgatttcgctcctaagcca

SEQ ID NO: 507097 - DNA, 30 bp, Artificial Sequence
  Synthetic oligonucleotide
cgtagcctccccccccggcgacgtaagcca

SEQ ID NO: 507098 - DNA, 30 bp, Artificial Sequence
  Synthetic oligonucleotide
atattcttcattccagatcgcggacagcca

SEQ ID NO: 507099 - DNA, 30 bp, Artificial Sequence
  Synthetic oligonucleotide
gtctttgtcccaaccaatctcggacagcca

SEQ ID NO: 507100 - DNA, 30 bp, Artificial Sequence
  Synthetic oligonucleotide
tagggggcgctcgcgtacagggcgcagcca

SEQ ID NO: 507101 - DNA, 30 bp, Artificial Sequence
  Synthetic oligonucleotide
tcgtcggcaccgggacgcacgtggcagcca

SEQ ID NO: 507102 - DNA, 30 bp, Artificial Sequence
  Synthetic oligonucleotide
ttcaagataccttggttgaggcctcagcca

SEQ ID NO: 507103 - DNA, 30 bp, Artificial Sequence
  Synthetic oligonucleotide
cggttagtggtgtggatcccatctcagcca

SEQ ID NO: 507104 - DNA, 30 bp, Artificial Sequence
  Synthetic oligonucleotide
catagttgcgggacgtcgcatcgtcagcca

SEQ ID NO: 507105 - DNA, 30 bp, Artificial Sequence
  Synthetic oligonucleotide
cgagaattctaaggcagaagaagagagcca

SEQ ID NO: 507106 - DNA, 30 bp, Artificial Sequence
  Synthetic oligonucleotide
gatcggggtctgagtagtgccaacgagcca

SEQ ID NO: 507107 - DNA, 30 bp, Artificial Sequence
  Synthetic oligonucleotide
cctatacttataaggacgagcaaggagcca

SEQ ID NO: 507108 - DNA, 30 bp, Artificial Sequence
  Synthetic oligonucleotide
ctccggacgtactggactcataaggagcca

SEQ ID NO: 507109 - DNA, 30 bp, Artificial Sequence
  Synthetic oligonucleotide
aattccacaatgtatatgaatacggagcca

SEQ ID NO: 507110 - DNA, 30 bp, Artificial Sequence
  Synthetic oligonucleotide
agcgaaatacaaaaattagtgccggagcca

SEQ ID NO: 507111 - DNA, 30 bp, Artificial Sequence
  Synthetic oligonucleotide
agtacacaacgttgggccagacgggagcca

SEQ ID NO: 507112 - DNA, 30 bp, Artificial Sequence
  Synthetic oligonucleotide
atgaggtagtaagcgctcccggtggagcca

SEQ ID NO: 507113 - DNA, 30 bp, Artificial Sequence
  Synthetic oligonucleotide
cgcgtcttggccaaaattccggtggagcca

SEQ ID NO: 507114 - DNA, 30 bp, Artificial Sequence
  Synthetic oligonucleotide
cttgaagcaagctcatccgtcgatgagcca

SEQ ID NO: 507115 - DNA, 30 bp, Artificial Sequence
  Synthetic oligonucleotide
ggattagtatggactataatgtaatagcca

SEQ ID NO: 507116 - DNA, 30 bp, Artificial Sequence
  Synthetic oligonucleotide
gggagccaaacgcgagttatttggtagcca

SEQ ID NO: 507117 - DNA, 30 bp, Artificial Sequence
  Synthetic oligonucleotide
aatatatcgggcgagcgaacatcttagcca

SEQ ID NO: 507118 - DNA, 31 bp, Artificial Sequence
  Synthetic oligonucleotide
gaactctgggtagcttaacaagcgttagcca

SEQ ID NO: 507119 - DNA, 30 bp, Artificial Sequence
  Synthetic oligonucleotide
ggacatcgtcgatcgaggaagataacgcca

SEQ ID NO: 507120 - DNA, 30 bp, Artificial Sequence
  Synthetic oligonucleotide
tgttctggtcacttgtcgcgaagcacgcca

SEQ ID NO: 507121 - DNA, 30 bp, Artificial Sequence
  Synthetic oligonucleotide
atccgctcagttaaaaaggtcagcacgcca

SEQ ID NO: 507122 - DNA, 29 bp, Artificial Sequence
  Synthetic oligonucleotide
ggggaaatcagggccattggatgacgcca

SEQ ID NO: 507123 - DNA, 30 bp, Artificial Sequence
  Synthetic oligonucleotide
gagcgccgctactgctagttacatacgcca

SEQ ID NO: 507124 - DNA, 30 bp, Artificial Sequence
  Synthetic oligonucleotide
aatagggctttatcttgcttccatacgcca

SEQ ID NO: 507125 - DNA, 30 bp, Artificial Sequence
  Synthetic oligonucleotide
tctctgtcaagttttgtcatctttacgcca

SEQ ID NO: 507126 - DNA, 30 bp, Artificial Sequence
  Synthetic oligonucleotide
atacaagcgtcatgggcggattttacgcca

SEQ ID NO: 507127 - DNA, 30 bp, Artificial Sequence
  Synthetic oligonucleotide
caagcagccatggatccattgatgccgcca

SEQ ID NO: 507128 - DNA, 30 bp, Artificial Sequence
  Synthetic oligonucleotide
ttttcagaaccggcggaaatgggagcgcca

SEQ ID NO: 507129 - DNA, 30 bp, Artificial Sequence
  Synthetic oligonucleotide
atctaagagtctcttggctactacgcgcca

SEQ ID NO: 507130 - DNA, 28 bp, Artificial Sequence
  Synthetic oligonucleotide
tttgcggggccgcagacattacgcgcca

SEQ ID NO: 507131 - DNA, 30 bp, Artificial Sequence
  Synthetic oligonucleotide
gacgaatcgcacagggggcaagccgcgcca

SEQ ID NO: 507132 - DNA, 31 bp, Artificial Sequence
  Synthetic oligonucleotide
aaatgtagtgactaccaattgggccgcgcca

SEQ ID NO: 507133 - DNA, 30 bp, Artificial Sequence
  Synthetic oligonucleotide
ctgacccgtgcggcaatgcgccatgcgcca

SEQ ID NO: 507134 - DNA, 30 bp, Artificial Sequence
  Synthetic oligonucleotide
gtcaacacagtagagttaatggcatcgcca

SEQ ID NO: 507135 - DNA, 30 bp, Artificial Sequence
  Synthetic oligonucleotide
aacgcgctgggctgtttatttctatcgcca

SEQ ID NO: 507136 - DNA, 30 bp, Artificial Sequence
  Synthetic oligonucleotide
gtgtaatggacggctctttcttcttcgcca

SEQ ID NO: 507137 - DNA, 30 bp, Artificial Sequence
  Synthetic oligonucleotide
cccccctcgggattataactcgaaaggcca

SEQ ID NO: 507138 - DNA, 30 bp, Artificial Sequence
  Synthetic oligonucleotide
cgcttcgatcaacaagtgcagcccaggcca

SEQ ID NO: 507139 - DNA, 30 bp, Artificial Sequence
  Synthetic oligonucleotide
cggcgacgtacctgcacgtgatttcggcca

SEQ ID NO: 507140 - DNA, 30 bp, Artificial Sequence
  Synthetic oligonucleotide
gatcagtgcaaagataagggataagggcca

SEQ ID NO: 507141 - DNA, 30 bp, Artificial Sequence
  Synthetic oligonucleotide
taaaaatctacagaagcaccagtagggcca

SEQ ID NO: 507142 - DNA, 30 bp, Artificial Sequence
  Synthetic oligonucleotide
cccctagggcgcagacgcataggcgggcca

SEQ ID NO: 507143 - DNA, 30 bp, Artificial Sequence
  Synthetic oligonucleotide
tgagagtcggggcgccagaaatgcgggcca

SEQ ID NO: 507144 - DNA, 30 bp, Artificial Sequence
  Synthetic oligonucleotide
agtacacaacggtgggccagacgggggcca

SEQ ID NO: 507145 - DNA, 30 bp, Artificial Sequence
  Synthetic oligonucleotide
agtaaaatttagtagtcttcgttggggcca

SEQ ID NO: 507146 - DNA, 30 bp, Artificial Sequence
  Synthetic oligonucleotide
aaacccgtcgttatcttgggagatgggcca

SEQ ID NO: 507147 - DNA, 30 bp, Artificial Sequence
  Synthetic oligonucleotide
atattattttaatttcgtaacgatgggcca

SEQ ID NO: 507148 - DNA, 30 bp, Artificial Sequence
  Synthetic oligonucleotide
ctgggttaagatcaagatgcgccatggcca

SEQ ID NO: 507149 - DNA, 30 bp, Artificial Sequence
  Synthetic oligonucleotide
gagagatcagaaattgccaaccgatggcca

SEQ ID NO: 507150 - DNA, 30 bp, Artificial Sequence
  Synthetic oligonucleotide
cagcttggcaggcaaacaaacgtttggcca

SEQ ID NO: 507151 - DNA, 30 bp, Artificial Sequence
  Synthetic oligonucleotide
atccaccagtagactgctaaaacaatgcca

SEQ ID NO: 507152 - DNA, 30 bp, Artificial Sequence
  Synthetic oligonucleotide
gccttcgcgtgtatgacctatttaatgcca

SEQ ID NO: 507153 - DNA, 30 bp, Artificial Sequence
  Synthetic oligonucleotide
cttttatgacactggaattgaagcatgcca

SEQ ID NO: 507154 - DNA, 30 bp, Artificial Sequence
  Synthetic oligonucleotide
ttggaggctgggaaccctgctacgatgcca

SEQ ID NO: 507155 - DNA, 30 bp, Artificial Sequence
  Synthetic oligonucleotide
gagtcgatgttccttgtaactcatatgcca

SEQ ID NO: 507156 - DNA, 30 bp, Artificial Sequence
  Synthetic oligonucleotide
taaatgtcatgcctgttcagccgcctgcca

SEQ ID NO: 507157 - DNA, 30 bp, Artificial Sequence
  Synthetic oligonucleotide
atgggagtaacatacttgggcgagctgcca

SEQ ID NO: 507158 - DNA, 30 bp, Artificial Sequence
  Synthetic oligonucleotide
tacggcacccctgtccgccgcacgctgcca

SEQ ID NO: 507159 - DNA, 30 bp, Artificial Sequence
  Synthetic oligonucleotide
gaattaaatagcaacatggtaagtctgcca

SEQ ID NO: 507160 - DNA, 30 bp, Artificial Sequence
  Synthetic oligonucleotide
tggggttcagaacgggacaacgttctgcca

SEQ ID NO: 507161 - DNA, 30 bp, Artificial Sequence
  Synthetic oligonucleotide
taaaaatttccaagaattatcgcagtgcca

SEQ ID NO: 507162 - DNA, 30 bp, Artificial Sequence
  Synthetic oligonucleotide
taggtatacggcgtataaatacaggtgcca

SEQ ID NO: 507163 - DNA, 30 bp, Artificial Sequence
  Synthetic oligonucleotide
cgcgcatagttaagctttttgcctgtgcca

SEQ ID NO: 507164 - DNA, 30 bp, Artificial Sequence
  Synthetic oligonucleotide
aacgtgtaattgggttagacggacttgcca

SEQ ID NO: 507165 - DNA, 30 bp, Artificial Sequence
  Synthetic oligonucleotide
tcctgagactcggttaagatatagttgcca

SEQ ID NO: 507166 - DNA, 30 bp, Artificial Sequence
  Synthetic oligonucleotide
aaacggtgactgtcaagtaggttgttgcca

SEQ ID NO: 507167 - DNA, 30 bp, Artificial Sequence
  Synthetic oligonucleotide
caatcaacgcagggcaacagacgtttgcca

SEQ ID NO: 507168 - DNA, 30 bp, Artificial Sequence
  Synthetic oligonucleotide
attttattgcggtcgccagatggtttgcca

SEQ ID NO: 507169 - DNA, 30 bp, Artificial Sequence
  Synthetic oligonucleotide
tattatatcttgacggcggcgaaaaatcca

SEQ ID NO: 507170 - DNA, 30 bp, Artificial Sequence
  Synthetic oligonucleotide
gcgactagtatgagttacggcatgaatcca

SEQ ID NO: 507171 - DNA, 30 bp, Artificial Sequence
  Synthetic oligonucleotide
ccttcacatatgcatgcgtgcgaacatcca

SEQ ID NO: 507172 - DNA, 30 bp, Artificial Sequence
  Synthetic oligonucleotide
gattctacggagcgataataccgacatcca

SEQ ID NO: 507173 - DNA, 30 bp, Artificial Sequence
  Synthetic oligonucleotide
tagcatggagtcttttgcaagggacatcca

SEQ ID NO: 507174 - DNA, 30 bp, Artificial Sequence
  Synthetic oligonucleotide
taagaaccttggcccggcgttctacatcca

SEQ ID NO: 507175 - DNA, 30 bp, Artificial Sequence
  Synthetic oligonucleotide
ttataaggactgatggcttagaaccatcca

SEQ ID NO: 507176 - DNA, 30 bp, Artificial Sequence
  Synthetic oligonucleotide
ttttcatctatacttacttatacccatcca

SEQ ID NO: 507177 - DNA, 30 bp, Artificial Sequence
  Synthetic oligonucleotide
tgccatcagtatctctcatcctcccatcca

SEQ ID NO: 507178 - DNA, 30 bp, Artificial Sequence
  Synthetic oligonucleotide
gtcatgccccggatgcgtcatgtccatcca

SEQ ID NO: 507179 - DNA, 30 bp, Artificial Sequence
  Synthetic oligonucleotide
ctgtttacagaggggcacgccccgcatcca

SEQ ID NO: 507180 - DNA, 30 bp, Artificial Sequence
  Synthetic oligonucleotide
cgccctctctcgtacctcgcaaggcatcca

SEQ ID NO: 507181 - DNA, 30 bp, Artificial Sequence
  Synthetic oligonucleotide
gatgaagcccgagtgacaagagaagatcca

SEQ ID NO: 507182 - DNA, 30 bp, Artificial Sequence
  Synthetic oligonucleotide
tacgaagtggttaaagaagctagagatcca

SEQ ID NO: 507183 - DNA, 30 bp, Artificial Sequence
  Synthetic oligonucleotide
cgacgccatttggttgggtcgcaggatcca

SEQ ID NO: 507184 - DNA, 30 bp, Artificial Sequence
  Synthetic oligonucleotide
gaatctactgagccgatgcattaatatcca

SEQ ID NO: 507185 - DNA, 30 bp, Artificial Sequence
  Synthetic oligonucleotide
tcaataatggggcagtattcaaactatcca

SEQ ID NO: 507186 - DNA, 30 bp, Artificial Sequence
  Synthetic oligonucleotide
taggataggctggtattccggccgtatcca

SEQ ID NO: 507187 - DNA, 30 bp, Artificial Sequence
  Synthetic oligonucleotide
cttgaacgtcgctaatacgccgtgtatcca

SEQ ID NO: 507188 - DNA, 30 bp, Artificial Sequence
  Synthetic oligonucleotide
aaaattggatgcacccacgggaattatcca

SEQ ID NO: 507189 - DNA, 30 bp, Artificial Sequence
  Synthetic oligonucleotide
tcaacccttaaagcggttcactattatcca

SEQ ID NO: 507190 - DNA, 30 bp, Artificial Sequence
  Synthetic oligonucleotide
tggaagtggacagatccctcgaaaactcca

SEQ ID NO: 507191 - DNA, 30 bp, Artificial Sequence
  Synthetic oligonucleotide
tttgcttatggtccggctagtttcactcca

SEQ ID NO: 507192 - DNA, 30 bp, Artificial Sequence
  Synthetic oligonucleotide
ccgcaatttggtggtgtgggagttactcca

SEQ ID NO: 507193 - DNA, 30 bp, Artificial Sequence
  Synthetic oligonucleotide
ggtattacgcgcacacccgcgatacctcca

SEQ ID NO: 507194 - DNA, 30 bp, Artificial Sequence
  Synthetic oligonucleotide
cgcatgagaggatgactggctcaccctcca

SEQ ID NO: 507195 - DNA, 30 bp, Artificial Sequence
  Synthetic oligonucleotide
ccgttagtgattttgggatgcacccctcca

SEQ ID NO: 507196 - DNA, 30 bp, Artificial Sequence
  Synthetic oligonucleotide
cccgccgccactagctgccagacccctcca

SEQ ID NO: 507197 - DNA, 30 bp, Artificial Sequence
  Synthetic oligonucleotide
aatctatgggtttcataaacgggccctcca

SEQ ID NO: 507198 - DNA, 30 bp, Artificial Sequence
  Synthetic oligonucleotide
gtagccggtagtgatgcaaacaggcctcca

SEQ ID NO: 507199 - DNA, 30 bp, Artificial Sequence
  Synthetic oligonucleotide
ggatgaggtacccggggcacttatcctcca

SEQ ID NO: 507200 - DNA, 30 bp, Artificial Sequence
  Synthetic oligonucleotide
gaattattaaagtataccggtcgcgctcca

SEQ ID NO: 507201 - DNA, 30 bp, Artificial Sequence
  Synthetic oligonucleotide
ttaacctaagatttcccatctaatgctcca

SEQ ID NO: 507202 - DNA, 30 bp, Artificial Sequence
  Synthetic oligonucleotide
cccgacccgtgtatagggtcagatgctcca

SEQ ID NO: 507203 - DNA, 30 bp, Artificial Sequence
  Synthetic oligonucleotide
taaatgtaacgggtcagaatagatgctcca

SEQ ID NO: 507204 - DNA, 30 bp, Artificial Sequence
  Synthetic oligonucleotide
agaatgttatgtagggtactggttgctcca

SEQ ID NO: 507205 - DNA, 30 bp, Artificial Sequence
  Synthetic oligonucleotide
gcagcctaaggaggctgaattatatctcca

SEQ ID NO: 507206 - DNA, 30 bp, Artificial Sequence
  Synthetic oligonucleotide
ttaagaacgttcattcgcgatatctctcca

SEQ ID NO: 507207 - DNA, 30 bp, Artificial Sequence
  Synthetic oligonucleotide
cgctgcgtcatttagagtgtactgtctcca

SEQ ID NO: 507208 - DNA, 30 bp, Artificial Sequence
  Synthetic oligonucleotide
gtgccccgcatcgggcgaatctcttctcca

SEQ ID NO: 507209 - DNA, 30 bp, Artificial Sequence
  Synthetic oligonucleotide
cacgttttcgctaatgcctgtgaaagtcca

SEQ ID NO: 507210 - DNA, 30 bp, Artificial Sequence
  Synthetic oligonucleotide
aaagccgacgcacgtgacgcgacaagtcca

SEQ ID NO: 507211 - DNA, 30 bp, Artificial Sequence
  Synthetic oligonucleotide
gtagttaggaatcgaaaaagtccaagtcca

SEQ ID NO: 507212 - DNA, 30 bp, Artificial Sequence
  Synthetic oligonucleotide
ttactaccccctggctcgagccgcagtcca

SEQ ID NO: 507213 - DNA, 30 bp, Artificial Sequence
  Synthetic oligonucleotide
tcggaatgtgaatagaaggacaagagtcca

SEQ ID NO: 507214 - DNA, 30 bp, Artificial Sequence
  Synthetic oligonucleotide
tttcttgtaccagaatttggttagagtcca

SEQ ID NO: 507215 - DNA, 30 bp, Artificial Sequence
  Synthetic oligonucleotide
cttcttgaggacgtttggtgtgggagtcca

SEQ ID NO: 507216 - DNA, 30 bp, Artificial Sequence
  Synthetic oligonucleotide
atatctttattgttgtcttgaaatagtcca

SEQ ID NO: 507217 - DNA, 30 bp, Artificial Sequence
  Synthetic oligonucleotide
aacctaggtactcagtatggttttagtcca

SEQ ID NO: 507218 - DNA, 30 bp, Artificial Sequence
  Synthetic oligonucleotide
tgtaaataagctagtaaccgctttcgtcca

SEQ ID NO: 507219 - DNA, 30 bp, Artificial Sequence
  Synthetic oligonucleotide
actcggttataaaaggcgccgtctggtcca

SEQ ID NO: 507220 - DNA, 30 bp, Artificial Sequence
  Synthetic oligonucleotide
actcgtttataaaaggcgccgtctggtcca

SEQ ID NO: 507221 - DNA, 30 bp, Artificial Sequence
  Synthetic oligonucleotide
agcaaaggccttttataaaggtttggtcca

SEQ ID NO: 507222 - DNA, 30 bp, Artificial Sequence
  Synthetic oligonucleotide
cgccaggctgcggaacaatgcaaatgtcca

SEQ ID NO: 507223 - DNA, 30 bp, Artificial Sequence
  Synthetic oligonucleotide
agaaagttccatatgggcaacctctgtcca

SEQ ID NO: 507224 - DNA, 30 bp, Artificial Sequence
  Synthetic oligonucleotide
attcggaggatttatttgccatggtgtcca

SEQ ID NO: 507225 - DNA, 30 bp, Artificial Sequence
  Synthetic oligonucleotide
atcctgaataccaacaatttggattgtcca

SEQ ID NO: 507226 - DNA, 30 bp, Artificial Sequence
  Synthetic oligonucleotide
gataccattgataggcgacgtgaaattcca

SEQ ID NO: 507227 - DNA, 30 bp, Artificial Sequence
  Synthetic oligonucleotide
attttcctcggcaacaaaatagtaattcca

SEQ ID NO: 507228 - DNA, 30 bp, Artificial Sequence
  Synthetic oligonucleotide
ccctccttcgttctctctactcgcattcca

SEQ ID NO: 507229 - DNA, 30 bp, Artificial Sequence
  Synthetic oligonucleotide
aaaaacacaggagtttgcattctcattcca

SEQ ID NO: 507230 - DNA, 30 bp, Artificial Sequence
  Synthetic oligonucleotide
gattagcggggttatcaatcacagattcca

SEQ ID NO: 507231 - DNA, 30 bp, Artificial Sequence
  Synthetic oligonucleotide
ctctttgaaagttccataaacttgattcca

SEQ ID NO: 507232 - DNA, 30 bp, Artificial Sequence
  Synthetic oligonucleotide
ctaacgaacctttcactcgttcatattcca

SEQ ID NO: 507233 - DNA, 30 bp, Artificial Sequence
  Synthetic oligonucleotide
gttaaaaaccgctcctgacgggctattcca

SEQ ID NO: 507234 - DNA, 30 bp, Artificial Sequence
  Synthetic oligonucleotide
aggcatgctcactcatgggttatacttcca

SEQ ID NO: 507235 - DNA, 30 bp, Artificial Sequence
  Synthetic oligonucleotide
gatttccgggactcggtaatgttccttcca

SEQ ID NO: 507236 - DNA, 30 bp, Artificial Sequence
  Synthetic oligonucleotide
atacaaaagtatgtttagaggcagcttcca

SEQ ID NO: 507237 - DNA, 30 bp, Artificial Sequence
  Synthetic oligonucleotide
gtgccaggtacaatcgtgtcttggcttcca

SEQ ID NO: 507238 - DNA, 30 bp, Artificial Sequence
  Synthetic oligonucleotide
cttcctgtaagaaacgaatatcatcttcca

SEQ ID NO: 507239 - DNA, 30 bp, Artificial Sequence
  Synthetic oligonucleotide
taggttggtctgcgcgcccacagagttcca

SEQ ID NO: 507240 - DNA, 30 bp, Artificial Sequence
  Synthetic oligonucleotide
tgatccggcggtacctaacgtggcgttcca

SEQ ID NO: 507241 - DNA, 30 bp, Artificial Sequence
  Synthetic oligonucleotide
tccggctcacatgggaggctactggttcca

SEQ ID NO: 507242 - DNA, 30 bp, Artificial Sequence
  Synthetic oligonucleotide
tccgttactcattacgagcatgtgtttcca

SEQ ID NO: 507243 - DNA, 30 bp, Artificial Sequence
  Synthetic oligonucleotide
gaaaggccatttagtgctggctattttcca

SEQ ID NO: 507244 - DNA, 30 bp, Artificial Sequence
  Synthetic oligonucleotide
aatactggcataaataggtatgtttttcca

SEQ ID NO: 507245 - DNA, 30 bp, Artificial Sequence
  Synthetic oligonucleotide
tatggcattttaggccgagctttaaaagca

SEQ ID NO: 507246 - DNA, 30 bp, Artificial Sequence
  Synthetic oligonucleotide
atctacatcttcgatccgagagacaaagca

SEQ ID NO: 507247 - DNA, 30 bp, Artificial Sequence
  Synthetic oligonucleotide
aagtgcgattcagtagtagcgctcaaagca

SEQ ID NO: 507248 - DNA, 30 bp, Artificial Sequence
  Synthetic oligonucleotide
caatctttgtaatatactcccatgaaagca

SEQ ID NO: 507249 - DNA, 30 bp, Artificial Sequence
  Synthetic oligonucleotide
tttgaagtcaggtggagctcgatgaaagca

SEQ ID NO: 507250 - DNA, 30 bp, Artificial Sequence
  Synthetic oligonucleotide
tataacctgcttccagcgcaagttaaagca

SEQ ID NO: 507251 - DNA, 30 bp, Artificial Sequence
  Synthetic oligonucleotide
tttacgacggtggcgaaacactaacaagca

SEQ ID NO: 507252 - DNA, 30 bp, Artificial Sequence
  Synthetic oligonucleotide
aaggaggcaaatgagcaactgagacaagca

SEQ ID NO: 507253 - DNA, 30 bp, Artificial Sequence
  Synthetic oligonucleotide
ctatgttactttgacgccaccttccaagca

SEQ ID NO: 507254 - DNA, 30 bp, Artificial Sequence
  Synthetic oligonucleotide
tgtgcttacaatgataccacgacgcaagca

SEQ ID NO: 507255 - DNA, 30 bp, Artificial Sequence
  Synthetic oligonucleotide
gttaaccgctgatgatgcccgtctcaagca

SEQ ID NO: 507256 - DNA, 30 bp, Artificial Sequence
  Synthetic oligonucleotide
acgggcgaccgcactaagcgaatcgaagca

SEQ ID NO: 507257 - DNA, 30 bp, Artificial Sequence
  Synthetic oligonucleotide
gggtgaggcccttgcggatcaagggaagca

SEQ ID NO: 507258 - DNA, 30 bp, Artificial Sequence
  Synthetic oligonucleotide
ttgccaacaccataacccgacaatgaagca

SEQ ID NO: 507259 - DNA, 30 bp, Artificial Sequence
  Synthetic oligonucleotide
agaccctgaaagttgcagtgcgcataagca

SEQ ID NO: 507260 - DNA, 30 bp, Artificial Sequence
  Synthetic oligonucleotide
tcattagtgaaggtgactaggttgtaagca

SEQ ID NO: 507261 - DNA, 30 bp, Artificial Sequence
  Synthetic oligonucleotide
gcccaaccagagggatatgggcaaacagca

SEQ ID NO: 507262 - DNA, 30 bp, Artificial Sequence
  Synthetic oligonucleotide
gggactatttcagatgttcggagcacagca

SEQ ID NO: 507263 - DNA, 30 bp, Artificial Sequence
  Synthetic oligonucleotide
ggtctcaataagcttagctgtcgcacagca

SEQ ID NO: 507264 - DNA, 30 bp, Artificial Sequence
  Synthetic oligonucleotide
aagaatgatgggcgtcatcttgggacagca

SEQ ID NO: 507265 - DNA, 30 bp, Artificial Sequence
  Synthetic oligonucleotide
gcccgcggtgtgccatcggaaatgacagca

SEQ ID NO: 507266 - DNA, 30 bp, Artificial Sequence
  Synthetic oligonucleotide
tatggacgcagtttttggacttccccagca

SEQ ID NO: 507267 - DNA, 30 bp, Artificial Sequence
  Synthetic oligonucleotide
gcgtataaattacctccctcgctgccagca

SEQ ID NO: 507268 - DNA, 30 bp, Artificial Sequence
  Synthetic oligonucleotide
gacagtgcaatcaactggatagctccagca

SEQ ID NO: 507269 - DNA, 30 bp, Artificial Sequence
  Synthetic oligonucleotide
gaggaggatctcgatcgtcaccgggcagca

SEQ ID NO: 507270 - DNA, 30 bp, Artificial Sequence
  Synthetic oligonucleotide
atgcctaccgttgtcacaagttttgcagca

SEQ ID NO: 507271 - DNA, 30 bp, Artificial Sequence
  Synthetic oligonucleotide
gggcacgggtggttatgagtgatatcagca

SEQ ID NO: 507272 - DNA, 30 bp, Artificial Sequence
  Synthetic oligonucleotide
cattatacttcccgctatagcgattcagca

SEQ ID NO: 507273 - DNA, 30 bp, Artificial Sequence
  Synthetic oligonucleotide
accccgttgctccgccggtgcagcagagca

SEQ ID NO: 507274 - DNA, 30 bp, Artificial Sequence
  Synthetic oligonucleotide
tgttccgtgcttagaattgtcaagagagca

SEQ ID NO: 507275 - DNA, 30 bp, Artificial Sequence
  Synthetic oligonucleotide
aatgccgaaaaattactcaacaggagagca

SEQ ID NO: 507276 - DNA, 30 bp, Artificial Sequence
  Synthetic oligonucleotide
tctctgagctacgtccgcctgttgagagca

SEQ ID NO: 507277 - DNA, 30 bp, Artificial Sequence
  Synthetic oligonucleotide
catagtccccctcgggcttgatgtagagca

SEQ ID NO: 507278 - DNA, 30 bp, Artificial Sequence
  Synthetic oligonucleotide
cgggtccctatgaccaaccaccagcgagca

SEQ ID NO: 507279 - DNA, 30 bp, Artificial Sequence
  Synthetic oligonucleotide
tgggtagacgccctcatgtctatgcgagca

SEQ ID NO: 507280 - DNA, 30 bp, Artificial Sequence
  Synthetic oligonucleotide
gcgtaaccgaagggtagggctagaggagca

SEQ ID NO: 507281 - DNA, 30 bp, Artificial Sequence
  Synthetic oligonucleotide
cagaaaaaagacgttgactacaccggagca

SEQ ID NO: 507282 - DNA, 30 bp, Artificial Sequence
  Synthetic oligonucleotide
acgggctaccgcactaagcgaatcggagca

SEQ ID NO: 507283 - DNA, 30 bp, Artificial Sequence
  Synthetic oligonucleotide
aattgtcctagagtctcaaatttcggagca

SEQ ID NO: 507284 - DNA, 30 bp, Artificial Sequence
  Synthetic oligonucleotide
tgacagcatatttgtttctatgcgggagca

SEQ ID NO: 507285 - DNA, 31 bp, Artificial Sequence
  Synthetic oligonucleotide
tacgagcaactataggtacaggacatgagca

SEQ ID NO: 507286 - DNA, 30 bp, Artificial Sequence
  Synthetic oligonucleotide
gtcttgtatatcagagcagggagatgagca

SEQ ID NO: 507287 - DNA, 30 bp, Artificial Sequence
  Synthetic oligonucleotide
actaatatcggcgccctttactcaatagca

SEQ ID NO: 507288 - DNA, 31 bp, Artificial Sequence
  Synthetic oligonucleotide
accacaaagcggcgtggcaacgataatagca

SEQ ID NO: 507289 - DNA, 30 bp, Artificial Sequence
  Synthetic oligonucleotide
ctccctctcaacattaaaccggacatagca

SEQ ID NO: 507290 - DNA, 30 bp, Artificial Sequence
  Synthetic oligonucleotide
gcggctttacaccgtgatcgacggatagca

SEQ ID NO: 507291 - DNA, 30 bp, Artificial Sequence
  Synthetic oligonucleotide
agttctaacttgagcagctggcggatagca

SEQ ID NO: 507292 - DNA, 30 bp, Artificial Sequence
  Synthetic oligonucleotide
tagggcaaggtagtttgcgcaatgatagca

SEQ ID NO: 507293 - DNA, 30 bp, Artificial Sequence
  Synthetic oligonucleotide
gctctctatctagtgccagatatgatagca

SEQ ID NO: 507294 - DNA, 30 bp, Artificial Sequence
  Synthetic oligonucleotide
aaaacatcagggacgctgctcgttatagca

SEQ ID NO: 507295 - DNA, 30 bp, Artificial Sequence
  Synthetic oligonucleotide
tctctgacgggcgcgtggcgtaaactagca

SEQ ID NO: 507296 - DNA, 30 bp, Artificial Sequence
  Synthetic oligonucleotide
cgcctcttgtaaaagtctcaagaactagca

SEQ ID NO: 507297 - DNA, 30 bp, Artificial Sequence
  Synthetic oligonucleotide
acctcgcttaaagcctcagcaagcctagca

SEQ ID NO: 507298 - DNA, 30 bp, Artificial Sequence
  Synthetic oligonucleotide
agtctgcgtgctttagctctcgagctagca

SEQ ID NO: 507299 - DNA, 30 bp, Artificial Sequence
  Synthetic oligonucleotide
cggccttcaatttaccgggtatggctagca

SEQ ID NO: 507300 - DNA, 30 bp, Artificial Sequence
  Synthetic oligonucleotide
attacgctcgttttcctactaggtctagca

SEQ ID NO: 507301 - DNA, 30 bp, Artificial Sequence
  Synthetic oligonucleotide
acattttgaccgacagctcgtacagtagca

SEQ ID NO: 507302 - DNA, 30 bp, Artificial Sequence
  Synthetic oligonucleotide
ggggttgtcttcgattgacacgcggtagca

SEQ ID NO: 507303 - DNA, 30 bp, Artificial Sequence
  Synthetic oligonucleotide
gtacttaatcgatttcatccgcttgtagca

SEQ ID NO: 507304 - DNA, 30 bp, Artificial Sequence
  Synthetic oligonucleotide
cttgcagcactaatactggccgtattagca

SEQ ID NO: 507305 - DNA, 30 bp, Artificial Sequence
  Synthetic oligonucleotide
cggctcttcgcagcaagaatagccttagca

SEQ ID NO: 507306 - DNA, 30 bp, Artificial Sequence
  Synthetic oligonucleotide
ggtgtttggcatggttacctacatttagca

SEQ ID NO: 507307 - DNA, 30 bp, Artificial Sequence
  Synthetic oligonucleotide
tggagaccccgcctgatgcgcacgaacgca

SEQ ID NO: 507308 - DNA, 30 bp, Artificial Sequence
  Synthetic oligonucleotide
aggttgtccgaaggcgagtccaggaacgca

SEQ ID NO: 507309 - DNA, 30 bp, Artificial Sequence
  Synthetic oligonucleotide
gatcgtcacctaattacgcgacgtaacgca

SEQ ID NO: 507310 - DNA, 30 bp, Artificial Sequence
  Synthetic oligonucleotide
gttgcgaccagcttcatgcttaaacacgca

SEQ ID NO: 507311 - DNA, 30 bp, Artificial Sequence
  Synthetic oligonucleotide
ttacctttaccactttttaatcaacacgca

SEQ ID NO: 507312 - DNA, 30 bp, Artificial Sequence
  Synthetic oligonucleotide
gctatagagtccaggcgagcagaacacgca

SEQ ID NO: 507313 - DNA, 30 bp, Artificial Sequence
  Synthetic oligonucleotide
gtacttatttagggctcatttacacacgca

SEQ ID NO: 507314 - DNA, 30 bp, Artificial Sequence
  Synthetic oligonucleotide
ccctttgtaacgaagaaataatcacacgca

SEQ ID NO: 507315 - DNA, 30 bp, Artificial Sequence
  Synthetic oligonucleotide
ctaacctcttgcgttatgggtccgcacgca

SEQ ID NO: 507316 - DNA, 30 bp, Artificial Sequence
  Synthetic oligonucleotide
gaatccctagtgaacaaccaactgcacgca

SEQ ID NO: 507317 - DNA, 30 bp, Artificial Sequence
  Synthetic oligonucleotide
ctagtttcgtccggcgaaggtaaagacgca

SEQ ID NO: 507318 - DNA, 30 bp, Artificial Sequence
  Synthetic oligonucleotide
gacttcggactaatatgcatgtcagacgca

SEQ ID NO: 507319 - DNA, 30 bp, Artificial Sequence
  Synthetic oligonucleotide
aagctgcctatagttttggtcagagacgca

SEQ ID NO: 507320 - DNA, 30 bp, Artificial Sequence
  Synthetic oligonucleotide
gaggaacccattttcaaccgtcgagacgca

SEQ ID NO: 507321 - DNA, 30 bp, Artificial Sequence
  Synthetic oligonucleotide
gcaggttctgttctctggattgacgacgca

SEQ ID NO: 507322 - DNA, 30 bp, Artificial Sequence
  Synthetic oligonucleotide
gaaaagattaacaatatcttttacgacgca

SEQ ID NO: 507323 - DNA, 30 bp, Artificial Sequence
  Synthetic oligonucleotide
aaaaaaaagatagacgggaagagcgacgca

SEQ ID NO: 507324 - DNA, 30 bp, Artificial Sequence
  Synthetic oligonucleotide
gggactggtaggtctaattattgcgacgca

SEQ ID NO: 507325 - DNA, 30 bp, Artificial Sequence
  Synthetic oligonucleotide
ttatcatggaaaaggtgtgcgatcgacgca

SEQ ID NO: 507326 - DNA, 30 bp, Artificial Sequence
  Synthetic oligonucleotide
ctcccgggcgcgtgcttgctgcaggacgca

SEQ ID NO: 507327 - DNA, 30 bp, Artificial Sequence
  Synthetic oligonucleotide
tgttgaagttatccaggagcagcggacgca

SEQ ID NO: 507328 - DNA, 30 bp, Artificial Sequence
  Synthetic oligonucleotide
ctcaagtggcctattcaacgcgcggacgca

SEQ ID NO: 507329 - DNA, 30 bp, Artificial Sequence
  Synthetic oligonucleotide
cggcgactgcacggtctaataggggacgca

SEQ ID NO: 507330 - DNA, 30 bp, Artificial Sequence
  Synthetic oligonucleotide
gaatctccaggaacgtctcttttggacgca

SEQ ID NO: 507331 - DNA, 30 bp, Artificial Sequence
  Synthetic oligonucleotide
tatcatgagggtttatcaagttctgacgca

SEQ ID NO: 507332 - DNA, 30 bp, Artificial Sequence
  Synthetic oligonucleotide
gtgacgagctcgagtgtcggaagctacgca

SEQ ID NO: 507333 - DNA, 30 bp, Artificial Sequence
  Synthetic oligonucleotide
agattcacaccccgtgttgtcctgtacgca

SEQ ID NO: 507334 - DNA, 30 bp, Artificial Sequence
  Synthetic oligonucleotide
accgccatgcctaggttaggtgtttacgca

SEQ ID NO: 507335 - DNA, 30 bp, Artificial Sequence
  Synthetic oligonucleotide
tttaacgatcatggtggacatacaaccgca

SEQ ID NO: 507336 - DNA, 30 bp, Artificial Sequence
  Synthetic oligonucleotide
atagatcgtgccgcggcagctgcaaccgca

SEQ ID NO: 507337 - DNA, 30 bp, Artificial Sequence
  Synthetic oligonucleotide
tataactatagcggaggccgaaacaccgca

SEQ ID NO: 507338 - DNA, 30 bp, Artificial Sequence
  Synthetic oligonucleotide
ataattttaatagagtttcagctgaccgca

SEQ ID NO: 507339 - DNA, 30 bp, Artificial Sequence
  Synthetic oligonucleotide
agacgcacagcgacgtcggtcaataccgca

SEQ ID NO: 507340 - DNA, 30 bp, Artificial Sequence
  Synthetic oligonucleotide
ggagttcgacccatctcgtatcgccccgca

SEQ ID NO: 507341 - DNA, 30 bp, Artificial Sequence
  Synthetic oligonucleotide
ttttgaatggagcatacatgggtccccgca

SEQ ID NO: 507342 - DNA, 30 bp, Artificial Sequence
  Synthetic oligonucleotide
ctgacccagccgtaaagattgttccccgca

SEQ ID NO: 507343 - DNA, 30 bp, Artificial Sequence
  Synthetic oligonucleotide
accatctggcccttagtggccgggcccgca

SEQ ID NO: 507344 - DNA, 30 bp, Artificial Sequence
  Synthetic oligonucleotide
tttgtcccggtggtgccacaccatcccgca

SEQ ID NO: 507345 - DNA, 30 bp, Artificial Sequence
  Synthetic oligonucleotide
tgtttcattttgttagttcgatcagccgca

SEQ ID NO: 507346 - DNA, 30 bp, Artificial Sequence
  Synthetic oligonucleotide
ggcagcttgagtatgagtactatagccgca

SEQ ID NO: 507347 - DNA, 30 bp, Artificial Sequence
  Synthetic oligonucleotide
tattgctattctgcgtgactaaaggccgca

SEQ ID NO: 507348 - DNA, 30 bp, Artificial Sequence
  Synthetic oligonucleotide
gtcgggaagtaaagggggctcccggccgca

SEQ ID NO: 507349 - DNA, 30 bp, Artificial Sequence
  Synthetic oligonucleotide
ttcgggcataaggtcagcgggggggccgca

SEQ ID NO: 507350 - DNA, 30 bp, Artificial Sequence
  Synthetic oligonucleotide
ttacgtcacaatgtagaccgctttgccgca

SEQ ID NO: 507351 - DNA, 30 bp, Artificial Sequence
  Synthetic oligonucleotide
agcatgcacgagtgttcacgccactccgca

SEQ ID NO: 507352 - DNA, 30 bp, Artificial Sequence
  Synthetic oligonucleotide
agggggagagcctcccattggttgtccgca

SEQ ID NO: 507353 - DNA, 30 bp, Artificial Sequence
  Synthetic oligonucleotide
gcgaatcctcaagaagggcagcattccgca

SEQ ID NO: 507354 - DNA, 30 bp, Artificial Sequence
  Synthetic oligonucleotide
tatgttgcagctccccgcgacgaaagcgca

SEQ ID NO: 507355 - DNA, 30 bp, Artificial Sequence
  Synthetic oligonucleotide
atgcaataacgcggcgtatatgcaagcgca

SEQ ID NO: 507356 - DNA, 30 bp, Artificial Sequence
  Synthetic oligonucleotide
tgtgccccaaaccttacgtaacacagcgca

SEQ ID NO: 507357 - DNA, 30 bp, Artificial Sequence
  Synthetic oligonucleotide
gcgatccttgggatcggggcacgtagcgca

SEQ ID NO: 507358 - DNA, 30 bp, Artificial Sequence
  Synthetic oligonucleotide
gctatgtgctctgctttgccctgacgcgca

SEQ ID NO: 507359 - DNA, 30 bp, Artificial Sequence
  Synthetic oligonucleotide
tgacgggtatcacagataaactgccgcgca

SEQ ID NO: 507360 - DNA, 30 bp, Artificial Sequence
  Synthetic oligonucleotide
attcaaaaagatgctagtccaaaaggcgca

SEQ ID NO: 507361 - DNA, 30 bp, Artificial Sequence
  Synthetic oligonucleotide
tccagtgctcggcgcggcagcggaggcgca

SEQ ID NO: 507362 - DNA, 30 bp, Artificial Sequence
  Synthetic oligonucleotide
tattcattgtcctctatagtcataggcgca

SEQ ID NO: 507363 - DNA, 30 bp, Artificial Sequence
  Synthetic oligonucleotide
agttgcaagttgcctttgtcgtccggcgca

SEQ ID NO: 507364 - DNA, 30 bp, Artificial Sequence
  Synthetic oligonucleotide
ccgctatttcccgaattacaacgcggcgca

SEQ ID NO: 507365 - DNA, 30 bp, Artificial Sequence
  Synthetic oligonucleotide
taacataaaattgggattgtctcgggcgca

SEQ ID NO: 507366 - DNA, 30 bp, Artificial Sequence
  Synthetic oligonucleotide
actcaagagggtcgttcagtggatggcgca

SEQ ID NO: 507367 - DNA, 30 bp, Artificial Sequence
  Synthetic oligonucleotide
agaagatttctcccaaacaaggcctgcgca

SEQ ID NO: 507368 - DNA, 30 bp, Artificial Sequence
  Synthetic oligonucleotide
tcctcacttccgccggacaaatgtatcgca

SEQ ID NO: 507369 - DNA, 30 bp, Artificial Sequence
  Synthetic oligonucleotide
cgaaatttagggtaaccacaacgcctcgca

SEQ ID NO: 507370 - DNA, 30 bp, Artificial Sequence
  Synthetic oligonucleotide
cctgcctctcacacagcaagagatctcgca

SEQ ID NO: 507371 - DNA, 30 bp, Artificial Sequence
  Synthetic oligonucleotide
gacgtgtgggttcgctacttaactctcgca

SEQ ID NO: 507372 - DNA, 30 bp, Artificial Sequence
  Synthetic oligonucleotide
gttctatgtgacgcatccggagaagtcgca

SEQ ID NO: 507373 - DNA, 30 bp, Artificial Sequence
  Synthetic oligonucleotide
agcctgatatttagccggcccttagtcgca

SEQ ID NO: 507374 - DNA, 30 bp, Artificial Sequence
  Synthetic oligonucleotide
ggcaagaccgtgatcttagttatggtcgca

SEQ ID NO: 507375 - DNA, 30 bp, Artificial Sequence
  Synthetic oligonucleotide
ctttaggttccgatcctatcatgtgtcgca

SEQ ID NO: 507376 - DNA, 30 bp, Artificial Sequence
  Synthetic oligonucleotide
aaagggtacgctgcttctaccattgtcgca

SEQ ID NO: 507377 - DNA, 30 bp, Artificial Sequence
  Synthetic oligonucleotide
gtctatgaaagttttggtccagccttcgca

SEQ ID NO: 507378 - DNA, 30 bp, Artificial Sequence
  Synthetic oligonucleotide
tatcgccgtgtagctgtgttagccttcgca

SEQ ID NO: 507379 - DNA, 30 bp, Artificial Sequence
  Synthetic oligonucleotide
gttcatgtccgaagatagttaatcttcgca

SEQ ID NO: 507380 - DNA, 30 bp, Artificial Sequence
  Synthetic oligonucleotide
cgctcagggatctaccaatcgaagttcgca

SEQ ID NO: 507381 - DNA, 30 bp, Artificial Sequence
  Synthetic oligonucleotide
cattcatcaaaagtgtagtacaggttcgca

SEQ ID NO: 507382 - DNA, 30 bp, Artificial Sequence
  Synthetic oligonucleotide
tacacagtcccattctcaagtcatttcgca

SEQ ID NO: 507383 - DNA, 30 bp, Artificial Sequence
  Synthetic oligonucleotide
tttatcgcaagatggggggtgtctttcgca

SEQ ID NO: 507384 - DNA, 30 bp, Artificial Sequence
  Synthetic oligonucleotide
ctcgtcgaaggacaatgtttgtctttcgca

SEQ ID NO: 507385 - DNA, 30 bp, Artificial Sequence
  Synthetic oligonucleotide
gcaagctcctcagggggttcctttttcgca

SEQ ID NO: 507386 - DNA, 30 bp, Artificial Sequence
  Synthetic oligonucleotide
ggaaatagcataagacgttcctcaaaggca

SEQ ID NO: 507387 - DNA, 30 bp, Artificial Sequence
  Synthetic oligonucleotide
ggggttttggtagatgtgttaggaaaggca

SEQ ID NO: 507388 - DNA, 30 bp, Artificial Sequence
  Synthetic oligonucleotide
gagtagtacgttaaggtttctgtaaaggca

SEQ ID NO: 507389 - DNA, 30 bp, Artificial Sequence
  Synthetic oligonucleotide
atcgctgcgatcttctgataacacaaggca

SEQ ID NO: 507390 - DNA, 30 bp, Artificial Sequence
  Synthetic oligonucleotide
gttacggtgtcagttggggagaggaaggca

SEQ ID NO: 507391 - DNA, 30 bp, Artificial Sequence
  Synthetic oligonucleotide
atagagacgctaacaggttaccttaaggca

SEQ ID NO: 507392 - DNA, 30 bp, Artificial Sequence
  Synthetic oligonucleotide
cgcccttccacgtgagccgccatacaggca

SEQ ID NO: 507393 - DNA, 30 bp, Artificial Sequence
  Synthetic oligonucleotide
tagttgatgctaaaggttctggcgcaggca

SEQ ID NO: 507394 - DNA, 30 bp, Artificial Sequence
  Synthetic oligonucleotide
tccactagccgtacgcgatcttgtcaggca

SEQ ID NO: 507395 - DNA, 30 bp, Artificial Sequence
  Synthetic oligonucleotide
ctcagctctttgggccttagggaagaggca

SEQ ID NO: 507396 - DNA, 30 bp, Artificial Sequence
  Synthetic oligonucleotide
cgcaacgcgcaaaatttctaggtagaggca

SEQ ID NO: 507397 - DNA, 30 bp, Artificial Sequence
  Synthetic oligonucleotide
agatcatggttgtaagcgttaacggaggca

SEQ ID NO: 507398 - DNA, 30 bp, Artificial Sequence
  Synthetic oligonucleotide
ggtccggggaaggttaaggctggggaggca

SEQ ID NO: 507399 - DNA, 30 bp, Artificial Sequence
  Synthetic oligonucleotide
gtccatggtatagctgagcgtcatgaggca

SEQ ID NO: 507400 - DNA, 30 bp, Artificial Sequence
  Synthetic oligonucleotide
gcaagctctttactctatttgactgaggca

SEQ ID NO: 507401 - DNA, 30 bp, Artificial Sequence
  Synthetic oligonucleotide
ggtgccgcaacgtcagtacttgttgaggca

SEQ ID NO: 507402 - DNA, 30 bp, Artificial Sequence
  Synthetic oligonucleotide
caatattacagtgtaggtcgcggctaggca

SEQ ID NO: 507403 - DNA, 30 bp, Artificial Sequence
  Synthetic oligonucleotide
aatgttatatcggataggtccgagtaggca

SEQ ID NO: 507404 - DNA, 30 bp, Artificial Sequence
  Synthetic oligonucleotide
ctttgcgagttatttactcgatagtaggca

SEQ ID NO: 507405 - DNA, 30 bp, Artificial Sequence
  Synthetic oligonucleotide
tccccgtccaaagacggttctatgtaggca

SEQ ID NO: 507406 - DNA, 30 bp, Artificial Sequence
  Synthetic oligonucleotide
gctaacagccgaaccgccgcggcttaggca

SEQ ID NO: 507407 - DNA, 30 bp, Artificial Sequence
  Synthetic oligonucleotide
gaactacgttaatcaggtttctgaacggca

SEQ ID NO: 507408 - DNA, 30 bp, Artificial Sequence
  Synthetic oligonucleotide
ttcgtgggccagcctagataagacacggca

SEQ ID NO: 507409 - DNA, 30 bp, Artificial Sequence
  Synthetic oligonucleotide
cggcaaagcacgcgcttgtagtacacggca

SEQ ID NO: 507410 - DNA, 30 bp, Artificial Sequence
  Synthetic oligonucleotide
tgccggcactatgttcaaagtaccacggca

SEQ ID NO: 507411 - DNA, 30 bp, Artificial Sequence
  Synthetic oligonucleotide
cggcctgcatgctaccgtcgtagtacggca

SEQ ID NO: 507412 - DNA, 31 bp, Artificial Sequence
  Synthetic oligonucleotide
ttgacggacatagcctcgaggaggtacggca

SEQ ID NO: 507413 - DNA, 30 bp, Artificial Sequence
  Synthetic oligonucleotide
cagcttacgttaacacgaagttgtacggca

SEQ ID NO: 507414 - DNA, 30 bp, Artificial Sequence
  Synthetic oligonucleotide
tgttagagctactactggcgttgtacggca

SEQ ID NO: 507415 - DNA, 30 bp, Artificial Sequence
  Synthetic oligonucleotide
ccagactcaatctccacaatttttacggca

SEQ ID NO: 507416 - DNA, 30 bp, Artificial Sequence
  Synthetic oligonucleotide
aattatagctaaattctgttcgaaccggca

SEQ ID NO: 507417 - DNA, 30 bp, Artificial Sequence
  Synthetic oligonucleotide
cgcagttgtcaacagatagatcacccggca

SEQ ID NO: 507418 - DNA, 30 bp, Artificial Sequence
  Synthetic oligonucleotide
tggtgactgcgttcattttgacccccggca

SEQ ID NO: 507419 - DNA, 30 bp, Artificial Sequence
  Synthetic oligonucleotide
gaagtggcgttacggccgtacggcccggca

SEQ ID NO: 507420 - DNA, 30 bp, Artificial Sequence
  Synthetic oligonucleotide
ccagctaagcgacgactgggtcggccggca

SEQ ID NO: 507421 - DNA, 30 bp, Artificial Sequence
  Synthetic oligonucleotide
ttcaacccctttccggtagccaatccggca

SEQ ID NO: 507422 - DNA, 30 bp, Artificial Sequence
  Synthetic oligonucleotide
aggtccctcgcttataaggtgaatccggca

SEQ ID NO: 507423 - DNA, 30 bp, Artificial Sequence
  Synthetic oligonucleotide
ctccgctcatatcgtatccagcctccggca

SEQ ID NO: 507424 - DNA, 30 bp, Artificial Sequence
  Synthetic oligonucleotide
tattttcgtcaaagtcattagaaagcggca

SEQ ID NO: 507425 - DNA, 30 bp, Artificial Sequence
  Synthetic oligonucleotide
cctactgtcatgactgcgtcaagcgcggca

SEQ ID NO: 507426 - DNA, 30 bp, Artificial Sequence
  Synthetic oligonucleotide
cttaaagaagatgcgagaaaacaatcggca

SEQ ID NO: 507427 - DNA, 30 bp, Artificial Sequence
  Synthetic oligonucleotide
ataagttggcatgtctcgataagatcggca

SEQ ID NO: 507428 - DNA, 30 bp, Artificial Sequence
  Synthetic oligonucleotide
gaggtcatggatgaagagcctctttcggca

SEQ ID NO: 507429 - DNA, 30 bp, Artificial Sequence
  Synthetic oligonucleotide
cggcaaacacgagagcatggtgcaagggca

SEQ ID NO: 507430 - DNA, 30 bp, Artificial Sequence
  Synthetic oligonucleotide
cttgggcacgtcgatagaacggtcagggca

SEQ ID NO: 507431 - DNA, 30 bp, Artificial Sequence
  Synthetic oligonucleotide
gggcgggcgaggcggaggtgggggcgggca

SEQ ID NO: 507432 - DNA, 30 bp, Artificial Sequence
  Synthetic oligonucleotide
attgagtcgcccgatgcataaaatcgggca

SEQ ID NO: 507433 - DNA, 30 bp, Artificial Sequence
  Synthetic oligonucleotide
atgaggcctttcatgcgacgcagtcgggca

SEQ ID NO: 507434 - DNA, 30 bp, Artificial Sequence
  Synthetic oligonucleotide
catcctgggcaaaaaacaggtgaaggggca

SEQ ID NO: 507435 - DNA, 30 bp, Artificial Sequence
  Synthetic oligonucleotide
aatgggaagtctgagcatggataaggggca

SEQ ID NO: 507436 - DNA, 30 bp, Artificial Sequence
  Synthetic oligonucleotide
gatccggaggttacgcagaatgacggggca

SEQ ID NO: 507437 - DNA, 30 bp, Artificial Sequence
  Synthetic oligonucleotide
gcgtagtgcggttaatgagacagcggggca

SEQ ID NO: 507438 - DNA, 30 bp, Artificial Sequence
  Synthetic oligonucleotide
ttgtgtttacgtcattcggtcctcggggca

SEQ ID NO: 507439 - DNA, 30 bp, Artificial Sequence
  Synthetic oligonucleotide
tgtgtgcatgattgtctaataccgggggca

SEQ ID NO: 507440 - DNA, 30 bp, Artificial Sequence
  Synthetic oligonucleotide
ccgccgggcgctgaccatcaccggggggca

SEQ ID NO: 507441 - DNA, 30 bp, Artificial Sequence
  Synthetic oligonucleotide
tagcacgcaggtgtccttagtatgggggca

SEQ ID NO: 507442 - DNA, 30 bp, Artificial Sequence
  Synthetic oligonucleotide
tatagatacaggaatcaaggcctgggggca

SEQ ID NO: 507443 - DNA, 30 bp, Artificial Sequence
  Synthetic oligonucleotide
ccgcagaattctgtactggcggtgggggca

SEQ ID NO: 507444 - DNA, 30 bp, Artificial Sequence
  Synthetic oligonucleotide
gtgctctgagttgtcacgcgctttggggca

SEQ ID NO: 507445 - DNA, 30 bp, Artificial Sequence
  Synthetic oligonucleotide
taaacaggacgaccccgacgacaatgggca

SEQ ID NO: 507446 - DNA, 30 bp, Artificial Sequence
  Synthetic oligonucleotide
aagcttgtaattattggggtccaatgggca

SEQ ID NO: 507447 - DNA, 30 bp, Artificial Sequence
  Synthetic oligonucleotide
ttggtccattcatggttaggggaatgggca

SEQ ID NO: 507448 - DNA, 29 bp, Artificial Sequence
  Synthetic oligonucleotide
agtgatgttgtaacaattaaatatgggca

SEQ ID NO: 507449 - DNA, 30 bp, Artificial Sequence
  Synthetic oligonucleotide
aattttgaaaggtagagtcctttatgggca

SEQ ID NO: 507450 - DNA, 29 bp, Artificial Sequence
  Synthetic oligonucleotide
gtacctgggtatacttcggcgggtgggca

SEQ ID NO: 507451 - DNA, 30 bp, Artificial Sequence
  Synthetic oligonucleotide
tgtttaaaatcgtctgcactggtgtgggca

SEQ ID NO: 507452 - DNA, 30 bp, Artificial Sequence
  Synthetic oligonucleotide
ttttagtcggatgcatctactcgttgggca

SEQ ID NO: 507453 - DNA, 30 bp, Artificial Sequence
  Synthetic oligonucleotide
aagccagaggacggacatacttagatggca

SEQ ID NO: 507454 - DNA, 30 bp, Artificial Sequence
  Synthetic oligonucleotide
atgctctgcggattgtataatgatatggca

SEQ ID NO: 507455 - DNA, 30 bp, Artificial Sequence
  Synthetic oligonucleotide
atttgacatcgggtggcacaagaactggca

SEQ ID NO: 507456 - DNA, 30 bp, Artificial Sequence
  Synthetic oligonucleotide
gatttttcgtcgaagaacctaatactggca

SEQ ID NO: 507457 - DNA, 30 bp, Artificial Sequence
  Synthetic oligonucleotide
tgaggtgagtaatggagtaaattactggca

SEQ ID NO: 507458 - DNA, 30 bp, Artificial Sequence
  Synthetic oligonucleotide
gcccccttgcccagacatgaattactggca

SEQ ID NO: 507459 - DNA, 30 bp, Artificial Sequence
  Synthetic oligonucleotide
cccacactgccagatataaacgccctggca

SEQ ID NO: 507460 - DNA, 30 bp, Artificial Sequence
  Synthetic oligonucleotide
ttgtcttgtggtttcccggttctcctggca

SEQ ID NO: 507461 - DNA, 30 bp, Artificial Sequence
  Synthetic oligonucleotide
cgaaatttaaatcaattgatgcagctggca

SEQ ID NO: 507462 - DNA, 30 bp, Artificial Sequence
  Synthetic oligonucleotide
taaaaagggaggtccttgaatacgctggca

SEQ ID NO: 507463 - DNA, 30 bp, Artificial Sequence
  Synthetic oligonucleotide
aaacacattttggaccatgccagagtggca

SEQ ID NO: 507464 - DNA, 30 bp, Artificial Sequence
  Synthetic oligonucleotide
gcaacccgaacggtctttgctagagtggca

SEQ ID NO: 507465 - DNA, 30 bp, Artificial Sequence
  Synthetic oligonucleotide
gaaatggattttgcagctatgatagtggca

SEQ ID NO: 507466 - DNA, 30 bp, Artificial Sequence
  Synthetic oligonucleotide
gactctgctagacaaatccataccgtggca

SEQ ID NO: 507467 - DNA, 30 bp, Artificial Sequence
  Synthetic oligonucleotide
cagtcagcgggaagctgaagtatggtggca

SEQ ID NO: 507468 - DNA, 30 bp, Artificial Sequence
  Synthetic oligonucleotide
aaacctcagaatattctggacctggtggca

SEQ ID NO: 507469 - DNA, 30 bp, Artificial Sequence
  Synthetic oligonucleotide
cgagcacacgcctcttcagtaggattggca

SEQ ID NO: 507470 - DNA, 30 bp, Artificial Sequence
  Synthetic oligonucleotide
gacacgatagatctgcgaaaatgattggca

SEQ ID NO: 507471 - DNA, 30 bp, Artificial Sequence
  Synthetic oligonucleotide
cggggtacgcgcaaagctatgccgttggca

SEQ ID NO: 507472 - DNA, 31 bp, Artificial Sequence
  Synthetic oligonucleotide
agaatgatagtcacgaagcattccgttggca

SEQ ID NO: 507473 - DNA, 30 bp, Artificial Sequence
  Synthetic oligonucleotide
caagccaatatgcccgtcattattttggca

SEQ ID NO: 507474 - DNA, 30 bp, Artificial Sequence
  Synthetic oligonucleotide
gagtgtccgtcgtttaatgagacgaatgca

SEQ ID NO: 507475 - DNA, 30 bp, Artificial Sequence
  Synthetic oligonucleotide
ggagacggcctatggcggagccggaatgca

SEQ ID NO: 507476 - DNA, 30 bp, Artificial Sequence
  Synthetic oligonucleotide
tattttgaatacggggctgctgggaatgca

SEQ ID NO: 507477 - DNA, 30 bp, Artificial Sequence
  Synthetic oligonucleotide
tcatctggccagaccgccgctcataatgca

SEQ ID NO: 507478 - DNA, 31 bp, Artificial Sequence
  Synthetic oligonucleotide
aacatgacaatatagcgactccgataatgca

SEQ ID NO: 507479 - DNA, 30 bp, Artificial Sequence
  Synthetic oligonucleotide
ttctttgggaagtgctcatggatccatgca

SEQ ID NO: 507480 - DNA, 30 bp, Artificial Sequence
  Synthetic oligonucleotide
gattatgaaagtgttatgatgtagcatgca

SEQ ID NO: 507481 - DNA, 30 bp, Artificial Sequence
  Synthetic oligonucleotide
gtaaacgcagtatgcgcgtgcaggcatgca

SEQ ID NO: 507482 - DNA, 30 bp, Artificial Sequence
  Synthetic oligonucleotide
aggtttatataatcgtgattatatcatgca

SEQ ID NO: 507483 - DNA, 30 bp, Artificial Sequence
  Synthetic oligonucleotide
ggacctctgatcttcgatccgaaagatgca

SEQ ID NO: 507484 - DNA, 30 bp, Artificial Sequence
  Synthetic oligonucleotide
gccgccggtcccttggatttataagatgca

SEQ ID NO: 507485 - DNA, 30 bp, Artificial Sequence
  Synthetic oligonucleotide
tcaagcttgtatacccactggatagatgca

SEQ ID NO: 507486 - DNA, 30 bp, Artificial Sequence
  Synthetic oligonucleotide
ttccgttatataagtctaatcctcgatgca

SEQ ID NO: 507487 - DNA, 30 bp, Artificial Sequence
  Synthetic oligonucleotide
gggtcgttctaatccgggtgcgtcgatgca

SEQ ID NO: 507488 - DNA, 31 bp, Artificial Sequence
  Synthetic oligonucleotide
aattacgggtgggtgttagcatcaggatgca

SEQ ID NO: 507489 - DNA, 30 bp, Artificial Sequence
  Synthetic oligonucleotide
gaacaatttatacgggtactgccggatgca

SEQ ID NO: 507490 - DNA, 30 bp, Artificial Sequence
  Synthetic oligonucleotide
tttcaggtacggatgttgcgtccggatgca

SEQ ID NO: 507491 - DNA, 30 bp, Artificial Sequence
  Synthetic oligonucleotide
cgaaaaaacgtctcaggaggcgatgatgca

SEQ ID NO: 507492 - DNA, 30 bp, Artificial Sequence
  Synthetic oligonucleotide
tagcggcccatggaggggttgtatgatgca

SEQ ID NO: 507493 - DNA, 30 bp, Artificial Sequence
  Synthetic oligonucleotide
aggtcagggtcgcacttccggattgatgca

SEQ ID NO: 507494 - DNA, 30 bp, Artificial Sequence
  Synthetic oligonucleotide
cgtgcgagattgcgggcgttctttgatgca

SEQ ID NO: 507495 - DNA, 30 bp, Artificial Sequence
  Synthetic oligonucleotide
gatttctgttcatataggcattaatatgca

SEQ ID NO: 507496 - DNA, 30 bp, Artificial Sequence
  Synthetic oligonucleotide
acatccgacaattcggagtatatatatgca

SEQ ID NO: 507497 - DNA, 30 bp, Artificial Sequence
  Synthetic oligonucleotide
ctgctcccgcggcttggttctccctatgca

SEQ ID NO: 507498 - DNA, 30 bp, Artificial Sequence
  Synthetic oligonucleotide
acaggtctctttatgcgtatattttatgca

SEQ ID NO: 507499 - DNA, 30 bp, Artificial Sequence
  Synthetic oligonucleotide
taccgagtggttgccgcagcttccactgca

SEQ ID NO: 507500 - DNA, 30 bp, Artificial Sequence
  Synthetic oligonucleotide
aaaggacactcgtttttagtcagcactgca

SEQ ID NO: 507501 - DNA, 30 bp, Artificial Sequence
  Synthetic oligonucleotide
tggatacgttttattttattaactactgca

SEQ ID NO: 507502 - DNA, 30 bp, Artificial Sequence
  Synthetic oligonucleotide
gggcggtgagagtctaaagtcgaacctgca

SEQ ID NO: 507503 - DNA, 30 bp, Artificial Sequence
  Synthetic oligonucleotide
ttagatatgacagtgtcacgggcacctgca

SEQ ID NO: 507504 - DNA, 30 bp, Artificial Sequence
  Synthetic oligonucleotide
cgccagggtagtggtcaagtgcgacctgca

SEQ ID NO: 507505 - DNA, 30 bp, Artificial Sequence
  Synthetic oligonucleotide
ggtccacactaactcgtggcttagcctgca

SEQ ID NO: 507506 - DNA, 30 bp, Artificial Sequence
  Synthetic oligonucleotide
acgactgaacatagacgagcagatcctgca

SEQ ID NO: 507507 - DNA, 30 bp, Artificial Sequence
  Synthetic oligonucleotide
agccaggattcgttctaccgttttcctgca

SEQ ID NO: 507508 - DNA, 30 bp, Artificial Sequence
  Synthetic oligonucleotide
gcccggtagcggctgcagcggggagctgca

SEQ ID NO: 507509 - DNA, 30 bp, Artificial Sequence
  Synthetic oligonucleotide
atgtcttggtcagcatgtatgagcgctgca

SEQ ID NO: 507510 - DNA, 30 bp, Artificial Sequence
  Synthetic oligonucleotide
tgcccgatatcgaggtgcagctgcgctgca

SEQ ID NO: 507511 - DNA, 30 bp, Artificial Sequence
  Synthetic oligonucleotide
ccccgtgtaaagaaacgagccaaggctgca

SEQ ID NO: 507512 - DNA, 30 bp, Artificial Sequence
  Synthetic oligonucleotide
cgaacgatgacgagccagttagaggctgca

SEQ ID NO: 507513 - DNA, 30 bp, Artificial Sequence
  Synthetic oligonucleotide
gattacacagctgtaagttgcgaggctgca

SEQ ID NO: 507514 - DNA, 30 bp, Artificial Sequence
  Synthetic oligonucleotide
tgcgattacacaggaggaagcacggctgca

SEQ ID NO: 507515 - DNA, 30 bp, Artificial Sequence
  Synthetic oligonucleotide
gaagctgctatacatatgcaattggctgca

SEQ ID NO: 507516 - DNA, 30 bp, Artificial Sequence
  Synthetic oligonucleotide
cccctgcgttgtagcacaagcgtatctgca

SEQ ID NO: 507517 - DNA, 30 bp, Artificial Sequence
  Synthetic oligonucleotide
agatgtccgggatctagacctgcctctgca

SEQ ID NO: 507518 - DNA, 30 bp, Artificial Sequence
  Synthetic oligonucleotide
acctgaaggcgcggccatcacttttctgca

SEQ ID NO: 507519 - DNA, 30 bp, Artificial Sequence
  Synthetic oligonucleotide
gcctcttgcaagctatggccgtgaagtgca

SEQ ID NO: 507520 - DNA, 30 bp, Artificial Sequence
  Synthetic oligonucleotide
cttgggcacgtcgatagaacggtcagtgca

SEQ ID NO: 507521 - DNA, 30 bp, Artificial Sequence
  Synthetic oligonucleotide
aatttaggttgttagcgcgcagagagtgca

SEQ ID NO: 507522 - DNA, 30 bp, Artificial Sequence
  Synthetic oligonucleotide
ctggtgtgagatggtgggtttatgagtgca

SEQ ID NO: 507523 - DNA, 30 bp, Artificial Sequence
  Synthetic oligonucleotide
ggggacatcatagacgcacgagtgagtgca

SEQ ID NO: 507524 - DNA, 30 bp, Artificial Sequence
  Synthetic oligonucleotide
aagctcctgtctactaataggttgagtgca

SEQ ID NO: 507525 - DNA, 30 bp, Artificial Sequence
  Synthetic oligonucleotide
aaatttagggctatagtattggcccgtgca

SEQ ID NO: 507526 - DNA, 30 bp, Artificial Sequence
  Synthetic oligonucleotide
tcaatataagacataaagcgcacgcgtgca

SEQ ID NO: 507527 - DNA, 30 bp, Artificial Sequence
  Synthetic oligonucleotide
ggagaatgggaagaagaaactccgcgtgca

SEQ ID NO: 507528 - DNA, 30 bp, Artificial Sequence
  Synthetic oligonucleotide
ttagttgtttgtggtttgtccgcgcgtgca

SEQ ID NO: 507529 - DNA, 30 bp, Artificial Sequence
  Synthetic oligonucleotide
gctgcccatttttctcaaaaggttcgtgca

SEQ ID NO: 507530 - DNA, 30 bp, Artificial Sequence
  Synthetic oligonucleotide
ttgtttccgcttctgcgatgaaaaggtgca

SEQ ID NO: 507531 - DNA, 30 bp, Artificial Sequence
  Synthetic oligonucleotide
gccgtcttaagccctttgaacaaaggtgca

SEQ ID NO: 507532 - DNA, 30 bp, Artificial Sequence
  Synthetic oligonucleotide
aattagccgcactgcactcctgaaggtgca

SEQ ID NO: 507533 - DNA, 30 bp, Artificial Sequence
  Synthetic oligonucleotide
tacccgtatgccctgacccctctcggtgca

SEQ ID NO: 507534 - DNA, 30 bp, Artificial Sequence
  Synthetic oligonucleotide
cagagaaaccctaacgtgtctgtgggtgca

SEQ ID NO: 507535 - DNA, 30 bp, Artificial Sequence
  Synthetic oligonucleotide
ggtagaatgacatagctttacgcatgtgca

SEQ ID NO: 507536 - DNA, 30 bp, Artificial Sequence
  Synthetic oligonucleotide
aaacttggtgactaccctggactgtgtgca

SEQ ID NO: 507537 - DNA, 30 bp, Artificial Sequence
  Synthetic oligonucleotide
gcattagtttagatcgcagggcattgtgca

SEQ ID NO: 507538 - DNA, 30 bp, Artificial Sequence
  Synthetic oligonucleotide
gttttgttcatacctttggggcattgtgca

SEQ ID NO: 507539 - DNA, 30 bp, Artificial Sequence
  Synthetic oligonucleotide
agggttatatgctagtaacttgcttgtgca

SEQ ID NO: 507540 - DNA, 30 bp, Artificial Sequence
  Synthetic oligonucleotide
tttgactagctcggccttgtagtaattgca

SEQ ID NO: 507541 - DNA, 30 bp, Artificial Sequence
  Synthetic oligonucleotide
gatcccgaggtaaattgcctctacattgca

SEQ ID NO: 507542 - DNA, 30 bp, Artificial Sequence
  Synthetic oligonucleotide
acgggcttcgttttcatatatggcattgca

SEQ ID NO: 507543 - DNA, 30 bp, Artificial Sequence
  Synthetic oligonucleotide
ttgttatccatctgttccataaagattgca

SEQ ID NO: 507544 - DNA, 30 bp, Artificial Sequence
  Synthetic oligonucleotide
gtttgtcagtgttacatggcccggattgca

SEQ ID NO: 507545 - DNA, 30 bp, Artificial Sequence
  Synthetic oligonucleotide
catggtacccttccaacgggtgaccttgca

SEQ ID NO: 507546 - DNA, 30 bp, Artificial Sequence
  Synthetic oligonucleotide
ctccccccataaaaaacgtgcgtccttgca

SEQ ID NO: 507547 - DNA, 30 bp, Artificial Sequence
  Synthetic oligonucleotide
tgccaatgctgaatgcaaacattccttgca

SEQ ID NO: 507548 - DNA, 30 bp, Artificial Sequence
  Synthetic oligonucleotide
ctctcataggtttatggggtcagtcttgca

SEQ ID NO: 507549 - DNA, 30 bp, Artificial Sequence
  Synthetic oligonucleotide
cctccacgagttgaatcatgatcagttgca

SEQ ID NO: 507550 - DNA, 30 bp, Artificial Sequence
  Synthetic oligonucleotide
aacctccaatggaagccgaacgtagttgca

SEQ ID NO: 507551 - DNA, 30 bp, Artificial Sequence
  Synthetic oligonucleotide
atgtctgccgggcgcttagtggacgttgca

SEQ ID NO: 507552 - DNA, 30 bp, Artificial Sequence
  Synthetic oligonucleotide
gcagacttagagagaatcgcgcgtgttgca

SEQ ID NO: 507553 - DNA, 30 bp, Artificial Sequence
  Synthetic oligonucleotide
ggcgtcagctcccactgtcctgttgttgca

SEQ ID NO: 507554 - DNA, 30 bp, Artificial Sequence
  Synthetic oligonucleotide
ctttcagattatatggaccgcgattttgca

SEQ ID NO: 507555 - DNA, 30 bp, Artificial Sequence
  Synthetic oligonucleotide
ctcgcagttaccgccttgtcatcaaaatca

SEQ ID NO: 507556 - DNA, 30 bp, Artificial Sequence
  Synthetic oligonucleotide
cgcctagagatgacgcttccctgaaaatca

SEQ ID NO: 507557 - DNA, 30 bp, Artificial Sequence
  Synthetic oligonucleotide
aaggagaatccgagggtgattctcaaatca

SEQ ID NO: 507558 - DNA, 30 bp, Artificial Sequence
  Synthetic oligonucleotide
ggtattattaggaaagtccgaaataaatca

SEQ ID NO: 507559 - DNA, 30 bp, Artificial Sequence
  Synthetic oligonucleotide
atgccagaatgcgcacggcggcgtaaatca

SEQ ID NO: 507560 - DNA, 30 bp, Artificial Sequence
  Synthetic oligonucleotide
gataatcgagcgccatggctgtgtaaatca

SEQ ID NO: 507561 - DNA, 30 bp, Artificial Sequence
  Synthetic oligonucleotide
ggtcggctaactagatgtaataaacaatca

SEQ ID NO: 507562 - DNA, 30 bp, Artificial Sequence
  Synthetic oligonucleotide
gtctgtcgtcaataagggaagccacaatca

SEQ ID NO: 507563 - DNA, 30 bp, Artificial Sequence
  Synthetic oligonucleotide
aaacttgatcttcttcccggtggacaatca

SEQ ID NO: 507564 - DNA, 30 bp, Artificial Sequence
  Synthetic oligonucleotide
tgacccgcagcaatcgtcggtggccaatca

SEQ ID NO: 507565 - DNA, 30 bp, Artificial Sequence
  Synthetic oligonucleotide
gaaacgcagccagtcttctgactccaatca

SEQ ID NO: 507566 - DNA, 30 bp, Artificial Sequence
  Synthetic oligonucleotide
tacggaggactctgtggaagcctccaatca

SEQ ID NO: 507567 - DNA, 30 bp, Artificial Sequence
  Synthetic oligonucleotide
ttctgtggcgtcatccgcgccttccaatca

SEQ ID NO: 507568 - DNA, 30 bp, Artificial Sequence
  Synthetic oligonucleotide
gagtatgtcggtcgcatacgccagcaatca

SEQ ID NO: 507569 - DNA, 30 bp, Artificial Sequence
  Synthetic oligonucleotide
ctataaatcctagcgtcagaatgtcaatca

SEQ ID NO: 507570 - DNA, 30 bp, Artificial Sequence
  Synthetic oligonucleotide
tatgacactagtgctgacgcttaagaatca

SEQ ID NO: 507571 - DNA, 30 bp, Artificial Sequence
  Synthetic oligonucleotide
ttagcagttagaggtttgagccgagaatca

SEQ ID NO: 507572 - DNA, 30 bp, Artificial Sequence
  Synthetic oligonucleotide
ccactgcttggaggcacgggatgagaatca

SEQ ID NO: 507573 - DNA, 30 bp, Artificial Sequence
  Synthetic oligonucleotide
ataaaagtttataatgggcatatcgaatca

SEQ ID NO: 507574 - DNA, 30 bp, Artificial Sequence
  Synthetic oligonucleotide
cgctgtacgtaggatcgataccaggaatca

SEQ ID NO: 507575 - DNA, 30 bp, Artificial Sequence
  Synthetic oligonucleotide
agctgttgcctcgattaatttcgggaatca

SEQ ID NO: 507576 - DNA, 30 bp, Artificial Sequence
  Synthetic oligonucleotide
tttacctgatgcgcgttgatgggggaatca

SEQ ID NO: 507577 - DNA, 30 bp, Artificial Sequence
  Synthetic oligonucleotide
ttggtgcgattactggctgatgatgaatca

SEQ ID NO: 507578 - DNA, 30 bp, Artificial Sequence
  Synthetic oligonucleotide
aaggagtgggggggttgcgtacaataatca

SEQ ID NO: 507579 - DNA, 30 bp, Artificial Sequence
  Synthetic oligonucleotide
aggcatatggattcgttacattaataatca

SEQ ID NO: 507580 - DNA, 30 bp, Artificial Sequence
  Synthetic oligonucleotide
ctatcggagtactcgagtaagtcataatca

SEQ ID NO: 507581 - DNA, 30 bp, Artificial Sequence
  Synthetic oligonucleotide
taggtctatgtctttaaaattctataatca

SEQ ID NO: 507582 - DNA, 30 bp, Artificial Sequence
  Synthetic oligonucleotide
ctcgacatcatgggtcaatttgactaatca

SEQ ID NO: 507583 - DNA, 30 bp, Artificial Sequence
  Synthetic oligonucleotide
ggcaattgtctaccaggcaacaagtaatca

SEQ ID NO: 507584 - DNA, 30 bp, Artificial Sequence
  Synthetic oligonucleotide
cttagctgaaagtaggagcatgagtaatca

SEQ ID NO: 507585 - DNA, 30 bp, Artificial Sequence
  Synthetic oligonucleotide
cagattgacagtctcgatggcgattaatca

SEQ ID NO: 507586 - DNA, 30 bp, Artificial Sequence
  Synthetic oligonucleotide
acggcaaccgttacaggggtcccttaatca

SEQ ID NO: 507587 - DNA, 30 bp, Artificial Sequence
  Synthetic oligonucleotide
ggatcactcgatccgtgactatcttaatca

SEQ ID NO: 507588 - DNA, 30 bp, Artificial Sequence
  Synthetic oligonucleotide
ccgatttactgaatagggactggttaatca

SEQ ID NO: 507589 - DNA, 30 bp, Artificial Sequence
  Synthetic oligonucleotide
gaacggtattgatatggtttttgttaatca

SEQ ID NO: 507590 - DNA, 30 bp, Artificial Sequence
  Synthetic oligonucleotide
caggatttttaggtagggtgtctttaatca

SEQ ID NO: 507591 - DNA, 30 bp, Artificial Sequence
  Synthetic oligonucleotide
gccgtttgtagattctctgtggctacatca

SEQ ID NO: 507592 - DNA, 30 bp, Artificial Sequence
  Synthetic oligonucleotide
ggaggtataaggcctagggctcaaccatca

SEQ ID NO: 507593 - DNA, 30 bp, Artificial Sequence
  Synthetic oligonucleotide
gatatatcctacgccagggataacccatca

SEQ ID NO: 507594 - DNA, 30 bp, Artificial Sequence
  Synthetic oligonucleotide
gattgctagcagcggcgtactgttccatca

SEQ ID NO: 507595 - DNA, 30 bp, Artificial Sequence
  Synthetic oligonucleotide
ttaacgcacgtaggccgatgtacagcatca

SEQ ID NO: 507596 - DNA, 30 bp, Artificial Sequence
  Synthetic oligonucleotide
ctataccacttgtgactcccctatgcatca

SEQ ID NO: 507597 - DNA, 30 bp, Artificial Sequence
  Synthetic oligonucleotide
aacctcgaaatgcatcaagagaaatcatca

SEQ ID NO: 507598 - DNA, 29 bp, Artificial Sequence
  Synthetic oligonucleotide
atcgagtgtttttactaccgtaatcatca

SEQ ID NO: 507599 - DNA, 30 bp, Artificial Sequence
  Synthetic oligonucleotide
actggataaccgggtattattttatcatca

SEQ ID NO: 507600 - DNA, 30 bp, Artificial Sequence
  Synthetic oligonucleotide
ggtataaccctgcatgaagctgtctcatca

SEQ ID NO: 507601 - DNA, 30 bp, Artificial Sequence
  Synthetic oligonucleotide
ctttgtaacatttgttgtcggacgtcatca

SEQ ID NO: 507602 - DNA, 30 bp, Artificial Sequence
  Synthetic oligonucleotide
gtcaattggtcagagatgcaatcgtcatca

SEQ ID NO: 507603 - DNA, 30 bp, Artificial Sequence
  Synthetic oligonucleotide
acgggtaggttcgacattggttattcatca

SEQ ID NO: 507604 - DNA, 30 bp, Artificial Sequence
  Synthetic oligonucleotide
ctcgcagttaccgccttgtcatccagatca

SEQ ID NO: 507605 - DNA, 30 bp, Artificial Sequence
  Synthetic oligonucleotide
aatataagacgcgcagtcccccagagatca

SEQ ID NO: 507606 - DNA, 30 bp, Artificial Sequence
  Synthetic oligonucleotide
cccagcgtgccgagtcaacagacgagatca

SEQ ID NO: 507607 - DNA, 30 bp, Artificial Sequence
  Synthetic oligonucleotide
aacggtaaggataccgatatctcgagatca

SEQ ID NO: 507608 - DNA, 30 bp, Artificial Sequence
  Synthetic oligonucleotide
gtacggtgccactcatattaacatagatca

SEQ ID NO: 507609 - DNA, 30 bp, Artificial Sequence
  Synthetic oligonucleotide
gtgtattcaacggttaagccatctagatca

SEQ ID NO: 507610 - DNA, 30 bp, Artificial Sequence
  Synthetic oligonucleotide
cttaatctccaaggtttcgcgtaacgatca

SEQ ID NO: 507611 - DNA, 30 bp, Artificial Sequence
  Synthetic oligonucleotide
taccgttttatatctaagcccagacgatca

SEQ ID NO: 507612 - DNA, 30 bp, Artificial Sequence
  Synthetic oligonucleotide
ccaatttcaatcacagtatccagacgatca

SEQ ID NO: 507613 - DNA, 30 bp, Artificial Sequence
  Synthetic oligonucleotide
gacgcttatttacaggggccatcgcgatca

SEQ ID NO: 507614 - DNA, 30 bp, Artificial Sequence
  Synthetic oligonucleotide
catccattagatgatatcggatggcgatca

SEQ ID NO: 507615 - DNA, 30 bp, Artificial Sequence
  Synthetic oligonucleotide
gtttccgacagtgaagacgtctatcgatca

SEQ ID NO: 507616 - DNA, 30 bp, Artificial Sequence
  Synthetic oligonucleotide
gatgtagctttatggctattcggtcgatca

SEQ ID NO: 507617 - DNA, 30 bp, Artificial Sequence
  Synthetic oligonucleotide
atcgatttctattcccgaggcacaggatca

SEQ ID NO: 507618 - DNA, 30 bp, Artificial Sequence
  Synthetic oligonucleotide
gtatagaccgacgtagagaccataggatca

SEQ ID NO: 507619 - DNA, 30 bp, Artificial Sequence
  Synthetic oligonucleotide
atgtcgcgcttttaaatatccatcggatca

SEQ ID NO: 507620 - DNA, 30 bp, Artificial Sequence
  Synthetic oligonucleotide
ctttgcaatcgactcgcctgagcgggatca

SEQ ID NO: 507621 - DNA, 30 bp, Artificial Sequence
  Synthetic oligonucleotide
cagtcgggctgtcatgacattgactgatca

SEQ ID NO: 507622 - DNA, 30 bp, Artificial Sequence
  Synthetic oligonucleotide
tccgtaggacgcacacgtcaatgctgatca

SEQ ID NO: 507623 - DNA, 30 bp, Artificial Sequence
  Synthetic oligonucleotide
ttcatgcggttgcatgagggtgcgtgatca

SEQ ID NO: 507624 - DNA, 30 bp, Artificial Sequence
  Synthetic oligonucleotide
ctacgattcagctaataatgtttgtgatca

SEQ ID NO: 507625 - DNA, 30 bp, Artificial Sequence
  Synthetic oligonucleotide
gttttttgccccaccttttttgattgatca

SEQ ID NO: 507626 - DNA, 30 bp, Artificial Sequence
  Synthetic oligonucleotide
ctcgcgtacaaactgattttttattgatca

SEQ ID NO: 507627 - DNA, 30 bp, Artificial Sequence
  Synthetic oligonucleotide
cgcagacaaagaagcactaaaagttgatca

SEQ ID NO: 507628 - DNA, 30 bp, Artificial Sequence
  Synthetic oligonucleotide
agagtcgtgttagacagcagatgaatatca

SEQ ID NO: 507629 - DNA, 30 bp, Artificial Sequence
  Synthetic oligonucleotide
atagaccgttaaccagtacgaagcatatca

SEQ ID NO: 507630 - DNA, 30 bp, Artificial Sequence
  Synthetic oligonucleotide
gtgatgctatgggtggaatcgcagatatca

SEQ ID NO: 507631 - DNA, 30 bp, Artificial Sequence
  Synthetic oligonucleotide
gtattacggggggaaacccgttctatatca

SEQ ID NO: 507632 - DNA, 30 bp, Artificial Sequence
  Synthetic oligonucleotide
tactgttaaattgtctgagatggagtatca

SEQ ID NO: 507633 - DNA, 30 bp, Artificial Sequence
  Synthetic oligonucleotide
gtggcagcgtagattttatagcccgtatca

SEQ ID NO: 507634 - DNA, 30 bp, Artificial Sequence
  Synthetic oligonucleotide
ggaaacaggcacttgtatgtagccgtatca

SEQ ID NO: 507635 - DNA, 30 bp, Artificial Sequence
  Synthetic oligonucleotide
cgttgaagtcctgaagtgcccgccgtatca

SEQ ID NO: 507636 - DNA, 30 bp, Artificial Sequence
  Synthetic oligonucleotide
gttttctagcaaactcacattagcgtatca

SEQ ID NO: 507637 - DNA, 30 bp, Artificial Sequence
  Synthetic oligonucleotide
ccgtaagaacaggttgacccttaggtatca

SEQ ID NO: 507638 - DNA, 30 bp, Artificial Sequence
  Synthetic oligonucleotide
gacatagacgcagaaacataactggtatca

SEQ ID NO: 507639 - DNA, 30 bp, Artificial Sequence
  Synthetic oligonucleotide
gaatgatgcatcatattagaagatgtatca

SEQ ID NO: 507640 - DNA, 30 bp, Artificial Sequence
  Synthetic oligonucleotide
gcttccgatgctgcaggacgcattgtatca

SEQ ID NO: 507641 - DNA, 30 bp, Artificial Sequence
  Synthetic oligonucleotide
agtttttccgtgcgtccgttggttgtatca

SEQ ID NO: 507642 - DNA, 30 bp, Artificial Sequence
  Synthetic oligonucleotide
taattttccacattgtggggatccttatca

SEQ ID NO: 507643 - DNA, 30 bp, Artificial Sequence
  Synthetic oligonucleotide
ttaagattgttgcggaggtatacgttatca

SEQ ID NO: 507644 - DNA, 30 bp, Artificial Sequence
  Synthetic oligonucleotide
aataatccattcgtgacttatactttatca

SEQ ID NO: 507645 - DNA, 30 bp, Artificial Sequence
  Synthetic oligonucleotide
tactaattgtgttgttccttaggcaactca

SEQ ID NO: 507646 - DNA, 30 bp, Artificial Sequence
  Synthetic oligonucleotide
gtgctacttgtgctagcatgaacgaactca

SEQ ID NO: 507647 - DNA, 30 bp, Artificial Sequence
  Synthetic oligonucleotide
ttgagcagactcatcaaaaatctgaactca

SEQ ID NO: 507648 - DNA, 30 bp, Artificial Sequence
  Synthetic oligonucleotide
gcatcatatttcaccataccggtgaactca

SEQ ID NO: 507649 - DNA, 30 bp, Artificial Sequence
  Synthetic oligonucleotide
aaattctgaacattgtcggacccacactca

SEQ ID NO: 507650 - DNA, 30 bp, Artificial Sequence
  Synthetic oligonucleotide
caatcgggaccttatgcgtccgcacactca

SEQ ID NO: 507651 - DNA, 30 bp, Artificial Sequence
  Synthetic oligonucleotide
tgaggcaggaaagtgtttgcggcacactca

SEQ ID NO: 507652 - DNA, 30 bp, Artificial Sequence
  Synthetic oligonucleotide
gtctgtattatgtcgaggatcggccactca

SEQ ID NO: 507653 - DNA, 30 bp, Artificial Sequence
  Synthetic oligonucleotide
attaacttaatggcaggggagaatcactca

SEQ ID NO: 507654 - DNA, 30 bp, Artificial Sequence
  Synthetic oligonucleotide
aatgcaccatccagtctagagtcagactca

SEQ ID NO: 507655 - DNA, 30 bp, Artificial Sequence
  Synthetic oligonucleotide
gttacagtatgcgcggttcacagtgactca

SEQ ID NO: 507656 - DNA, 30 bp, Artificial Sequence
  Synthetic oligonucleotide
acggagcatcgcaaaggttcaccctactca

SEQ ID NO: 507657 - DNA, 30 bp, Artificial Sequence
  Synthetic oligonucleotide
acgatgggggacgcggtgtccgcgtactca

SEQ ID NO: 507658 - DNA, 30 bp, Artificial Sequence
  Synthetic oligonucleotide
gcagggttcgggggtttcgggtcgtactca

SEQ ID NO: 507659 - DNA, 30 bp, Artificial Sequence
  Synthetic oligonucleotide
gtttggtaagtgtaaggtacattgtactca

SEQ ID NO: 507660 - DNA, 30 bp, Artificial Sequence
  Synthetic oligonucleotide
ataggcacgtaattgcccgggcgttactca

SEQ ID NO: 507661 - DNA, 30 bp, Artificial Sequence
  Synthetic oligonucleotide
cttaacttggttacttgttaaggaacctca

SEQ ID NO: 507662 - DNA, 30 bp, Artificial Sequence
  Synthetic oligonucleotide
agttctccgctaagttcgccagcaccctca

SEQ ID NO: 507663 - DNA, 30 bp, Artificial Sequence
  Synthetic oligonucleotide
caccccccgcttgtggacgtagagccctca

SEQ ID NO: 507664 - DNA, 30 bp, Artificial Sequence
  Synthetic oligonucleotide
gtcgtggaaactactttgcctgcgccctca

SEQ ID NO: 507665 - DNA, 30 bp, Artificial Sequence
  Synthetic oligonucleotide
aatttgccgcgtagagtagtactagcctca

SEQ ID NO: 507666 - DNA, 30 bp, Artificial Sequence
  Synthetic oligonucleotide
ttccctttttaagaccggttgcacgcctca

SEQ ID NO: 507667 - DNA, 30 bp, Artificial Sequence
  Synthetic oligonucleotide
tagcaactccgatgtcgggataactcctca

SEQ ID NO: 507668 - DNA, 30 bp, Artificial Sequence
  Synthetic oligonucleotide
gtacatgattttaagacatgttgttcctca

SEQ ID NO: 507669 - DNA, 30 bp, Artificial Sequence
  Synthetic oligonucleotide
aaacgcccgataccgggttatacaagctca

SEQ ID NO: 507670 - DNA, 30 bp, Artificial Sequence
  Synthetic oligonucleotide
aagtcaccaagccagcggcgggcaagctca

SEQ ID NO: 507671 - DNA, 30 bp, Artificial Sequence
  Synthetic oligonucleotide
ccaaggtcaataatacttagcttcagctca

SEQ ID NO: 507672 - DNA, 30 bp, Artificial Sequence
  Synthetic oligonucleotide
gacggcagcagtaggtacatgcggagctca

SEQ ID NO: 507673 - DNA, 30 bp, Artificial Sequence
  Synthetic oligonucleotide
gtttactgtactacccgtgccgatcgctca

SEQ ID NO: 507674 - DNA, 30 bp, Artificial Sequence
  Synthetic oligonucleotide
gctttactctgggaattttaatttcgctca

SEQ ID NO: 507675 - DNA, 30 bp, Artificial Sequence
  Synthetic oligonucleotide
cccataaattaagaaaaagactcaggctca

SEQ ID NO: 507676 - DNA, 30 bp, Artificial Sequence
  Synthetic oligonucleotide
tatgcaacattgcacccggctcgaggctca

SEQ ID NO: 507677 - DNA, 30 bp, Artificial Sequence
  Synthetic oligonucleotide
aatagctgatagttgtgccagtcgggctca

SEQ ID NO: 507678 - DNA, 30 bp, Artificial Sequence
  Synthetic oligonucleotide
gcgacgcatgtgaaagtgggctgtggctca

SEQ ID NO: 507679 - DNA, 30 bp, Artificial Sequence
  Synthetic oligonucleotide
aatagtaaagaccatagaagcaaatgctca

SEQ ID NO: 507680 - DNA, 30 bp, Artificial Sequence
  Synthetic oligonucleotide
aacgcgcgttgaatgcaccgaccgtgctca

SEQ ID NO: 507681 - DNA, 30 bp, Artificial Sequence
  Synthetic oligonucleotide
tatgcgcataatcttattttcgaaatctca

SEQ ID NO: 507682 - DNA, 30 bp, Artificial Sequence
  Synthetic oligonucleotide
aatgtattgcgacatatttaatgaatctca

SEQ ID NO: 507683 - DNA, 30 bp, Artificial Sequence
  Synthetic oligonucleotide
gaatgtcagattgcgagtacgctaatctca

SEQ ID NO: 507684 - DNA, 30 bp, Artificial Sequence
  Synthetic oligonucleotide
gccgacccacccaatatgggctggatctca

SEQ ID NO: 507685 - DNA, 30 bp, Artificial Sequence
  Synthetic oligonucleotide
accatgggttcgggtatcctcattatctca

SEQ ID NO: 507686 - DNA, 30 bp, Artificial Sequence
  Synthetic oligonucleotide
tctggaagagggggcccacggtaactctca

SEQ ID NO: 507687 - DNA, 30 bp, Artificial Sequence
  Synthetic oligonucleotide
attctctaagacttaccacattacctctca

SEQ ID NO: 507688 - DNA, 30 bp, Artificial Sequence
  Synthetic oligonucleotide
atctttacctgatgcaggtagaagctctca

SEQ ID NO: 507689 - DNA, 30 bp, Artificial Sequence
  Synthetic oligonucleotide
gttaatgcaaacaatgagggtaagctctca

SEQ ID NO: 507690 - DNA, 30 bp, Artificial Sequence
  Synthetic oligonucleotide
ccatgggccaccgggacagtgacgctctca

SEQ ID NO: 507691 - DNA, 30 bp, Artificial Sequence
  Synthetic oligonucleotide
cttctttacgccctctccgccgctctctca

SEQ ID NO: 507692 - DNA, 30 bp, Artificial Sequence
  Synthetic oligonucleotide
tgtcaacgtaatatggccacgcgtctctca

SEQ ID NO: 507693 - DNA, 30 bp, Artificial Sequence
  Synthetic oligonucleotide
aattttgacgagtttaagtggtaagtctca

SEQ ID NO: 507694 - DNA, 30 bp, Artificial Sequence
  Synthetic oligonucleotide
aaggtggggatcccgacattcggagtctca

SEQ ID NO: 507695 - DNA, 30 bp, Artificial Sequence
  Synthetic oligonucleotide
cgcatgcacgctatctaagtgcgggtctca

SEQ ID NO: 507696 - DNA, 30 bp, Artificial Sequence
  Synthetic oligonucleotide
gttatttcgagggcgttgagcggggtctca

SEQ ID NO: 507697 - DNA, 30 bp, Artificial Sequence
  Synthetic oligonucleotide
ttccgactcgccgggtcgtacggtgtctca

SEQ ID NO: 507698 - DNA, 30 bp, Artificial Sequence
  Synthetic oligonucleotide
cccccgaaaacccagtgttgtaaattctca

SEQ ID NO: 507699 - DNA, 30 bp, Artificial Sequence
  Synthetic oligonucleotide
gtagttttattattaagttggtacttctca

SEQ ID NO: 507700 - DNA, 30 bp, Artificial Sequence
  Synthetic oligonucleotide
caatcaattgcgcagcgggtgaccttctca

SEQ ID NO: 507701 - DNA, 30 bp, Artificial Sequence
  Synthetic oligonucleotide
tcttcaaaatgttgagcggcagccttctca

SEQ ID NO: 507702 - DNA, 30 bp, Artificial Sequence
  Synthetic oligonucleotide
gggtccccgtttatatcgagtattttctca

SEQ ID NO: 507703 - DNA, 30 bp, Artificial Sequence
  Synthetic oligonucleotide
gctatgcaagagtttgggtgttcaaagtca

SEQ ID NO: 507704 - DNA, 30 bp, Artificial Sequence
  Synthetic oligonucleotide
tccgtaaaacgatatgacaaaaccaagtca

SEQ ID NO: 507705 - DNA, 30 bp, Artificial Sequence
  Synthetic oligonucleotide
gatgtggcctagcattttttaatcaagtca

SEQ ID NO: 507706 - DNA, 30 bp, Artificial Sequence
  Synthetic oligonucleotide
ttatcgtcactcgatctgatgacgaagtca

SEQ ID NO: 507707 - DNA, 30 bp, Artificial Sequence
  Synthetic oligonucleotide
gcagaaatacaattcgcatatgcgaagtca

SEQ ID NO: 507708 - DNA, 30 bp, Artificial Sequence
  Synthetic oligonucleotide
gagcttaattaatcattgggttggaagtca

SEQ ID NO: 507709 - DNA, 30 bp, Artificial Sequence
  Synthetic oligonucleotide
cgacggtgatagcaagtaagatataagtca

SEQ ID NO: 507710 - DNA, 30 bp, Artificial Sequence
  Synthetic oligonucleotide
ggcagtgggggcaagttcggacaacagtca

SEQ ID NO: 507711 - DNA, 30 bp, Artificial Sequence
  Synthetic oligonucleotide
ttagttgtgacccgggcctcggaccagtca

SEQ ID NO: 507712 - DNA, 30 bp, Artificial Sequence
  Synthetic oligonucleotide
gatcgtaaagtagagtatagtgaccagtca

SEQ ID NO: 507713 - DNA, 30 bp, Artificial Sequence
  Synthetic oligonucleotide
aacaattcaaaagaactggatcgccagtca

SEQ ID NO: 507714 - DNA, 30 bp, Artificial Sequence
  Synthetic oligonucleotide
gaccacgaggggtaatgtctgacgcagtca

SEQ ID NO: 507715 - DNA, 30 bp, Artificial Sequence
  Synthetic oligonucleotide
atgtagcagcccgagttatgattgcagtca

SEQ ID NO: 507716 - DNA, 30 bp, Artificial Sequence
  Synthetic oligonucleotide
gggtattcttctgtgctactttaagagtca

SEQ ID NO: 507717 - DNA, 30 bp, Artificial Sequence
  Synthetic oligonucleotide
gaatttacattaatttgggggtacgagtca

SEQ ID NO: 507718 - DNA, 30 bp, Artificial Sequence
  Synthetic oligonucleotide
ggaaagcatactcctgctgacatggagtca

SEQ ID NO: 507719 - DNA, 30 bp, Artificial Sequence
  Synthetic oligonucleotide
acgttgttacgtgatcgggattaatagtca

SEQ ID NO: 507720 - DNA, 30 bp, Artificial Sequence
  Synthetic oligonucleotide
aagttgactattcgtcttgattaatagtca

SEQ ID NO: 507721 - DNA, 30 bp, Artificial Sequence
  Synthetic oligonucleotide
aaagacatgagttgcatgacagcatagtca

SEQ ID NO: 507722 - DNA, 30 bp, Artificial Sequence
  Synthetic oligonucleotide
tagggtatgacacccgatgtgtagtagtca

SEQ ID NO: 507723 - DNA, 30 bp, Artificial Sequence
  Synthetic oligonucleotide
gagggacagataaatgggcgggcgtagtca

SEQ ID NO: 507724 - DNA, 30 bp, Artificial Sequence
  Synthetic oligonucleotide
tataacataaggtcagcggagctgtagtca

SEQ ID NO: 507725 - DNA, 30 bp, Artificial Sequence
  Synthetic oligonucleotide
tatagtagattaccgacggaaacttagtca

SEQ ID NO: 507726 - DNA, 30 bp, Artificial Sequence
  Synthetic oligonucleotide
taaataagatatttttctacgaaaacgtca

SEQ ID NO: 507727 - DNA, 30 bp, Artificial Sequence
  Synthetic oligonucleotide
gtctgcctacaaaagccagtttagacgtca

SEQ ID NO: 507728 - DNA, 30 bp, Artificial Sequence
  Synthetic oligonucleotide
ggtccggttggtctctgaagggtgacgtca

SEQ ID NO: 507729 - DNA, 30 bp, Artificial Sequence
  Synthetic oligonucleotide
cagcataacacgattggagacagtacgtca

SEQ ID NO: 507730 - DNA, 30 bp, Artificial Sequence
  Synthetic oligonucleotide
tcgtcgcagttgtgtcctagttgtacgtca

SEQ ID NO: 507731 - DNA, 30 bp, Artificial Sequence
  Synthetic oligonucleotide
atacggtgtcatggttcaccccatccgtca

SEQ ID NO: 507732 - DNA, 30 bp, Artificial Sequence
  Synthetic oligonucleotide
tgagtcagctcaaccgagccagaagcgtca

SEQ ID NO: 507733 - DNA, 30 bp, Artificial Sequence
  Synthetic oligonucleotide
aaggtcgtgcttgctgatacataagcgtca

SEQ ID NO: 507734 - DNA, 30 bp, Artificial Sequence
  Synthetic oligonucleotide
cctagagaaggggatagggacatagcgtca

SEQ ID NO: 507735 - DNA, 30 bp, Artificial Sequence
  Synthetic oligonucleotide
acatgcaatccgaaagcaagtgtcgcgtca

SEQ ID NO: 507736 - DNA, 30 bp, Artificial Sequence
  Synthetic oligonucleotide
agcccttcccatcatggactctgggcgtca

SEQ ID NO: 507737 - DNA, 30 bp, Artificial Sequence
  Synthetic oligonucleotide
tctgcgctggagtctttttacttggcgtca

SEQ ID NO: 507738 - DNA, 30 bp, Artificial Sequence
  Synthetic oligonucleotide
ggaccagtgggttggtagctaaatgcgtca

SEQ ID NO: 507739 - DNA, 40 bp, Artificial Sequence
  Synthetic oligonucleotide
cggtaaggagggtcaccgacgtcgagccgttgctgcgtca

SEQ ID NO: 507740 - DNA, 40 bp, Artificial Sequence
  Synthetic oligonucleotide
cggtaaggagggtcaccgacggcgcgccgttgctgcgtca

SEQ ID NO: 507741 - DNA, 40 bp, Artificial Sequence
  Synthetic oligonucleotide
cggtaaggaggggcaccgacgtcgcgccgttgctgcgtca

SEQ ID NO: 507742 - DNA, 40 bp, Artificial Sequence
  Synthetic oligonucleotide
cagtaaggagggtcaccgacgtcgcgccgttgctgcgtca

SEQ ID NO: 507743 - DNA, 40 bp, Artificial Sequence
  Synthetic oligonucleotide
cggtaaggatggtcaccgacgtcgcgccgttgctgcgtca

SEQ ID NO: 507744 - DNA, 40 bp, Artificial Sequence
  Synthetic oligonucleotide
cggtaaggagtgtcaccgacgtcgcgccgttgctgcgtca

SEQ ID NO: 507745 - DNA, 40 bp, Artificial Sequence
  Synthetic oligonucleotide
cggtaaggaggttcaccgacgtcgcgccgttgctgcgtca

SEQ ID NO: 507746 - DNA, 30 bp, Artificial Sequence
  Synthetic oligonucleotide
catgttgcagttggagtgatcggtgcgtca

SEQ ID NO: 507747 - DNA, 30 bp, Artificial Sequence
  Synthetic oligonucleotide
caccgtagtaagagggtgcgaaagtcgtca

SEQ ID NO: 507748 - DNA, 30 bp, Artificial Sequence
  Synthetic oligonucleotide
tcggtttcgacaaaagtaaaaaggtcgtca

SEQ ID NO: 507749 - DNA, 30 bp, Artificial Sequence
  Synthetic oligonucleotide
cgggcgccataaaagcaaccgaattcgtca

SEQ ID NO: 507750 - DNA, 30 bp, Artificial Sequence
  Synthetic oligonucleotide
tgatgacgaattatggctcaccattcgtca

SEQ ID NO: 507751 - DNA, 30 bp, Artificial Sequence
  Synthetic oligonucleotide
gataagatcagtgcttgacgaatttcgtca

SEQ ID NO: 507752 - DNA, 30 bp, Artificial Sequence
  Synthetic oligonucleotide
gaaattagtgtgagcgagcgtgtttcgtca

SEQ ID NO: 507753 - DNA, 30 bp, Artificial Sequence
  Synthetic oligonucleotide
tgaaagtctcatgtcgggtgacaaaggtca

SEQ ID NO: 507754 - DNA, 30 bp, Artificial Sequence
  Synthetic oligonucleotide
agccagttcgcacagcttggagaaaggtca

SEQ ID NO: 507755 - DNA, 30 bp, Artificial Sequence
  Synthetic oligonucleotide
aacccgccaacctgccggcactaaaggtca

SEQ ID NO: 507756 - DNA, 30 bp, Artificial Sequence
  Synthetic oligonucleotide
cgctggtcctaaagtctctgtctaaggtca

SEQ ID NO: 507757 - DNA, 30 bp, Artificial Sequence
  Synthetic oligonucleotide
tgcaacatgaaccgttcacaagtaaggtca

SEQ ID NO: 507758 - DNA, 30 bp, Artificial Sequence
  Synthetic oligonucleotide
gcctgctcgtcccgcttgcaagtaaggtca

SEQ ID NO: 507759 - DNA, 30 bp, Artificial Sequence
  Synthetic oligonucleotide
tggagcataatgctcgagggatagaggtca

SEQ ID NO: 507760 - DNA, 30 bp, Artificial Sequence
  Synthetic oligonucleotide
tgtttcccattgattgatgaactgaggtca

SEQ ID NO: 507761 - DNA, 30 bp, Artificial Sequence
  Synthetic oligonucleotide
gcagtaaaccttaagactgggtctaggtca

SEQ ID NO: 507762 - DNA, 30 bp, Artificial Sequence
  Synthetic oligonucleotide
aattcaagtaatggacatcgacttaggtca

SEQ ID NO: 507763 - DNA, 30 bp, Artificial Sequence
  Synthetic oligonucleotide
tttattaaggtttgacgggcccttaggtca

SEQ ID NO: 507764 - DNA, 30 bp, Artificial Sequence
  Synthetic oligonucleotide
cgcctgatgttataatcaatacatcggtca

SEQ ID NO: 507765 - DNA, 30 bp, Artificial Sequence
  Synthetic oligonucleotide
aaacaacattatggcgttgcggcagggtca

SEQ ID NO: 507766 - DNA, 30 bp, Artificial Sequence
  Synthetic oligonucleotide
aaattactccaaattccggtagacgggtca

SEQ ID NO: 507767 - DNA, 30 bp, Artificial Sequence
  Synthetic oligonucleotide
gagaatcggggatcactcacaaaggggtca

SEQ ID NO: 507768 - DNA, 30 bp, Artificial Sequence
  Synthetic oligonucleotide
ggtattttaaggtttttagggtcggggtca

SEQ ID NO: 507769 - DNA, 30 bp, Artificial Sequence
  Synthetic oligonucleotide
tgcgagtctgcgggcgatcaaagggggtca

SEQ ID NO: 507770 - DNA, 30 bp, Artificial Sequence
  Synthetic oligonucleotide
ttcgatgtctgacacttgggttgggggtca

SEQ ID NO: 507771 - DNA, 29 bp, Artificial Sequence
  Synthetic oligonucleotide
cgtgaattgttcgtctacggcaatggtca

SEQ ID NO: 507772 - DNA, 30 bp, Artificial Sequence
  Synthetic oligonucleotide
tcggtcaccgttcttttttctcgatggtca

SEQ ID NO: 507773 - DNA, 30 bp, Artificial Sequence
  Synthetic oligonucleotide
gtcaatctgtcagttttactttactggtca

SEQ ID NO: 507774 - DNA, 30 bp, Artificial Sequence
  Synthetic oligonucleotide
cgcaatgtggtgcaggatacccgctggtca

SEQ ID NO: 507775 - DNA, 30 bp, Artificial Sequence
  Synthetic oligonucleotide
ggggtgactcgaattgattaatagtggtca

SEQ ID NO: 507776 - DNA, 30 bp, Artificial Sequence
  Synthetic oligonucleotide
agaggtgttatatcatgccgcgggtggtca

SEQ ID NO: 507777 - DNA, 30 bp, Artificial Sequence
  Synthetic oligonucleotide
tatactacaggattttgtctgtggtggtca

SEQ ID NO: 507778 - DNA, 30 bp, Artificial Sequence
  Synthetic oligonucleotide
tatatgtaggtttagtgtaatttaatgtca

SEQ ID NO: 507779 - DNA, 30 bp, Artificial Sequence
  Synthetic oligonucleotide
gtcttaatgttaggttcacatttaatgtca

SEQ ID NO: 507780 - DNA, 30 bp, Artificial Sequence
  Synthetic oligonucleotide
aaatagaaggtgtataagttacagatgtca

SEQ ID NO: 507781 - DNA, 30 bp, Artificial Sequence
  Synthetic oligonucleotide
ttggtaacataacgatacgggtctatgtca

SEQ ID NO: 507782 - DNA, 30 bp, Artificial Sequence
  Synthetic oligonucleotide
catcgaggaagacattatggcagtatgtca

SEQ ID NO: 507783 - DNA, 30 bp, Artificial Sequence
  Synthetic oligonucleotide
ggctcttaacgcattatcgcttgtatgtca

SEQ ID NO: 507784 - DNA, 30 bp, Artificial Sequence
  Synthetic oligonucleotide
tatctctcattgataaatgtaattatgtca

SEQ ID NO: 507785 - DNA, 30 bp, Artificial Sequence
  Synthetic oligonucleotide
gtacgcgccttgacgttctggcccctgtca

SEQ ID NO: 507786 - DNA, 30 bp, Artificial Sequence
  Synthetic oligonucleotide
aattctgcaagatgacacgctgtcctgtca

SEQ ID NO: 507787 - DNA, 30 bp, Artificial Sequence
  Synthetic oligonucleotide
gaatcgcgcctggcataagttactctgtca

SEQ ID NO: 507788 - DNA, 30 bp, Artificial Sequence
  Synthetic oligonucleotide
atcggacgacaaactccgtattctctgtca

SEQ ID NO: 507789 - DNA, 30 bp, Artificial Sequence
  Synthetic oligonucleotide
caggatctgggtgatcttccagttctgtca

SEQ ID NO: 507790 - DNA, 30 bp, Artificial Sequence
  Synthetic oligonucleotide
atctaggattttagcagcttgtaagtgtca

SEQ ID NO: 507791 - DNA, 30 bp, Artificial Sequence
  Synthetic oligonucleotide
atctgatcattgcggagaaaacgagtgtca

SEQ ID NO: 507792 - DNA, 30 bp, Artificial Sequence
  Synthetic oligonucleotide
ccctttgtaaccgtgcataaccaattgtca

SEQ ID NO: 507793 - DNA, 30 bp, Artificial Sequence
  Synthetic oligonucleotide
aactggaaagactcttaccagatattgtca

SEQ ID NO: 507794 - DNA, 30 bp, Artificial Sequence
  Synthetic oligonucleotide
tgaaaaccttccatcttagtctccttgtca

SEQ ID NO: 507795 - DNA, 30 bp, Artificial Sequence
  Synthetic oligonucleotide
gccaatcgccactcggccgcggctttgtca

SEQ ID NO: 507796 - DNA, 30 bp, Artificial Sequence
  Synthetic oligonucleotide
agcacacgtgactcgggttgcggtttgtca

SEQ ID NO: 507797 - DNA, 30 bp, Artificial Sequence
  Synthetic oligonucleotide
agtatagacttgaatgacattggtttgtca

SEQ ID NO: 507798 - DNA, 30 bp, Artificial Sequence
  Synthetic oligonucleotide
gaccgtgaagaggagactcagcaaaattca

SEQ ID NO: 507799 - DNA, 30 bp, Artificial Sequence
  Synthetic oligonucleotide
aattaatccattcgctagcggagaaattca

SEQ ID NO: 507800 - DNA, 30 bp, Artificial Sequence
  Synthetic oligonucleotide
gggttgtctatcaggtcagcattaaattca

SEQ ID NO: 507801 - DNA, 30 bp, Artificial Sequence
  Synthetic oligonucleotide
gactcgtacgagccggtcctgagcaattca

SEQ ID NO: 507802 - DNA, 30 bp, Artificial Sequence
  Synthetic oligonucleotide
aatcgcaagcctcttgtgcgtatcaattca

SEQ ID NO: 507803 - DNA, 30 bp, Artificial Sequence
  Synthetic oligonucleotide
aatgacaccgcgcgctacggcaagaattca

SEQ ID NO: 507804 - DNA, 30 bp, Artificial Sequence
  Synthetic oligonucleotide
ggatatgttacctaaaattcccataattca

SEQ ID NO: 507805 - DNA, 30 bp, Artificial Sequence
  Synthetic oligonucleotide
agcagtttacatggttgcgagcataattca

SEQ ID NO: 507806 - DNA, 30 bp, Artificial Sequence
  Synthetic oligonucleotide
tcatctgtccttatgtaaaaaattaattca

SEQ ID NO: 507807 - DNA, 30 bp, Artificial Sequence
  Synthetic oligonucleotide
ttaacgatctcttagagcatcgttaattca

SEQ ID NO: 507808 - DNA, 30 bp, Artificial Sequence
  Synthetic oligonucleotide
aagcgtcggacccctaattcattacattca

SEQ ID NO: 507809 - DNA, 30 bp, Artificial Sequence
  Synthetic oligonucleotide
aaactcttccccagggccaggtaccattca

SEQ ID NO: 507810 - DNA, 30 bp, Artificial Sequence
  Synthetic oligonucleotide
caggcttagcgtcgaggtccctggcattca

SEQ ID NO: 507811 - DNA, 30 bp, Artificial Sequence
  Synthetic oligonucleotide
aactcggttcatgtgctgggatcagattca

SEQ ID NO: 507812 - DNA, 30 bp, Artificial Sequence
  Synthetic oligonucleotide
gctggccgttaagcatggatcgtagattca

SEQ ID NO: 507813 - DNA, 30 bp, Artificial Sequence
  Synthetic oligonucleotide
aaaactaggtttgaccattcggacgattca

SEQ ID NO: 507814 - DNA, 30 bp, Artificial Sequence
  Synthetic oligonucleotide
ggctagaacacaaattctgattgggattca

SEQ ID NO: 507815 - DNA, 30 bp, Artificial Sequence
  Synthetic oligonucleotide
tatatgtgttttcaacatgcgttggattca

SEQ ID NO: 507816 - DNA, 30 bp, Artificial Sequence
  Synthetic oligonucleotide
atgccactaagccctggtacgactgattca

SEQ ID NO: 507817 - DNA, 30 bp, Artificial Sequence
  Synthetic oligonucleotide
gagcgttcacagtacgtgggtgaatattca

SEQ ID NO: 507818 - DNA, 27 bp, Artificial Sequence
  Synthetic oligonucleotide
gaacctcgggttccgttgaactattca

SEQ ID NO: 507819 - DNA, 30 bp, Artificial Sequence
  Synthetic oligonucleotide
cctactttgatcgcggcagtatggtattca

SEQ ID NO: 507820 - DNA, 30 bp, Artificial Sequence
  Synthetic oligonucleotide
tctcctagccctgcagcgttgcgttattca

SEQ ID NO: 507821 - DNA, 30 bp, Artificial Sequence
  Synthetic oligonucleotide
ctgcgataccgtgagcatacatgaacttca

SEQ ID NO: 507822 - DNA, 30 bp, Artificial Sequence
  Synthetic oligonucleotide
aggcgtacacgtcgcctgtttgtaacttca

SEQ ID NO: 507823 - DNA, 30 bp, Artificial Sequence
  Synthetic oligonucleotide
tttccagatgaaggcactaaccgcacttca

SEQ ID NO: 507824 - DNA, 30 bp, Artificial Sequence
  Synthetic oligonucleotide
tttctaacgtatagcgaacgaggcacttca

SEQ ID NO: 507825 - DNA, 30 bp, Artificial Sequence
  Synthetic oligonucleotide
gaggagtgcccctcaccctcggggacttca

SEQ ID NO: 507826 - DNA, 30 bp, Artificial Sequence
  Synthetic oligonucleotide
agtacttaagccgctagttcccctacttca

SEQ ID NO: 507827 - DNA, 30 bp, Artificial Sequence
  Synthetic oligonucleotide
aaaataaaacgtgctctgggcggtacttca

SEQ ID NO: 507828 - DNA, 30 bp, Artificial Sequence
  Synthetic oligonucleotide
taactagtagcgttgccatatgaaccttca

SEQ ID NO: 507829 - DNA, 30 bp, Artificial Sequence
  Synthetic oligonucleotide
tagtgtcctatggtggattcttgaccttca

SEQ ID NO: 507830 - DNA, 30 bp, Artificial Sequence
  Synthetic oligonucleotide
tgtgattgtctcagaccttagttaccttca

SEQ ID NO: 507831 - DNA, 30 bp, Artificial Sequence
  Synthetic oligonucleotide
gcatcgacgggggagcgaactcccccttca

SEQ ID NO: 507832 - DNA, 30 bp, Artificial Sequence
  Synthetic oligonucleotide
agtttccatgctgtagctgcagagccttca

SEQ ID NO: 507833 - DNA, 30 bp, Artificial Sequence
  Synthetic oligonucleotide
ggtacaccatagagagccatagggccttca

SEQ ID NO: 507834 - DNA, 30 bp, Artificial Sequence
  Synthetic oligonucleotide
tttctattatagggtccagcagatccttca

SEQ ID NO: 507835 - DNA, 30 bp, Artificial Sequence
  Synthetic oligonucleotide
ttaggaaacatcagatatgaggcagcttca

SEQ ID NO: 507836 - DNA, 30 bp, Artificial Sequence
  Synthetic oligonucleotide
gttacatgctagactgccaggatagcttca

SEQ ID NO: 507837 - DNA, 30 bp, Artificial Sequence
  Synthetic oligonucleotide
caatgaaaggtacgtactgtagtagcttca

SEQ ID NO: 507838 - DNA, 30 bp, Artificial Sequence
  Synthetic oligonucleotide
aaaagtaaatatcattttaggggcgcttca

SEQ ID NO: 507839 - DNA, 30 bp, Artificial Sequence
  Synthetic oligonucleotide
gatcttttactagggatgtccggggcttca

SEQ ID NO: 507840 - DNA, 30 bp, Artificial Sequence
  Synthetic oligonucleotide
gagcccgcaatgcctactgaggtggcttca

SEQ ID NO: 507841 - DNA, 30 bp, Artificial Sequence
  Synthetic oligonucleotide
taatctcctacctctggcgtggctgcttca

SEQ ID NO: 507842 - DNA, 30 bp, Artificial Sequence
  Synthetic oligonucleotide
tatttaactgtgtgtgaaccttctgcttca

SEQ ID NO: 507843 - DNA, 30 bp, Artificial Sequence
  Synthetic oligonucleotide
agccgaaagttcgctgcgaattactcttca

SEQ ID NO: 507844 - DNA, 30 bp, Artificial Sequence
  Synthetic oligonucleotide
atctactcaagaattagacaaggctcttca

SEQ ID NO: 507845 - DNA, 30 bp, Artificial Sequence
  Synthetic oligonucleotide
taataagcttcttccatagacctctcttca

SEQ ID NO: 507846 - DNA, 30 bp, Artificial Sequence
  Synthetic oligonucleotide
agagtccataacgccccatgggagtcttca

SEQ ID NO: 507847 - DNA, 30 bp, Artificial Sequence
  Synthetic oligonucleotide
gagtgcgtcacacatatttgacaaagttca

SEQ ID NO: 507848 - DNA, 31 bp, Artificial Sequence
  Synthetic oligonucleotide
ccccaggtttcataggacccacgtaagttca

SEQ ID NO: 507849 - DNA, 30 bp, Artificial Sequence
  Synthetic oligonucleotide
cgatcgtccgtgcattattcgaacagttca

SEQ ID NO: 507850 - DNA, 30 bp, Artificial Sequence
  Synthetic oligonucleotide
tgtcgctagcacgtgtctgtttgcagttca

SEQ ID NO: 507851 - DNA, 30 bp, Artificial Sequence
  Synthetic oligonucleotide
cactaggaggatacggtaagagtcagttca

SEQ ID NO: 507852 - DNA, 30 bp, Artificial Sequence
  Synthetic oligonucleotide
aaaagccggatagctcggcgttagagttca

SEQ ID NO: 507853 - DNA, 30 bp, Artificial Sequence
  Synthetic oligonucleotide
agttctttagagacacgcgttccgagttca

SEQ ID NO: 507854 - DNA, 30 bp, Artificial Sequence
  Synthetic oligonucleotide
gtcacaatcgtggagtcacctcggagttca

SEQ ID NO: 507855 - DNA, 30 bp, Artificial Sequence
  Synthetic oligonucleotide
ttatgtcatttgctagctctcatgagttca

SEQ ID NO: 507856 - DNA, 30 bp, Artificial Sequence
  Synthetic oligonucleotide
gcgaatcacgacgacatcgctcgacgttca

SEQ ID NO: 507857 - DNA, 29 bp, Artificial Sequence
  Synthetic oligonucleotide
taactttcgcaaatgccggcatacgttca

SEQ ID NO: 507858 - DNA, 30 bp, Artificial Sequence
  Synthetic oligonucleotide
tacaagttcagcggctagatgaaccgttca

SEQ ID NO: 507859 - DNA, 30 bp, Artificial Sequence
  Synthetic oligonucleotide
gtttctaacttagtaattacccgccgttca

SEQ ID NO: 507860 - DNA, 30 bp, Artificial Sequence
  Synthetic oligonucleotide
ttgatcaatatatggatagcgcggcgttca

SEQ ID NO: 507861 - DNA, 30 bp, Artificial Sequence
  Synthetic oligonucleotide
gccaatgggctatttatcaatgggcgttca

SEQ ID NO: 507862 - DNA, 30 bp, Artificial Sequence
  Synthetic oligonucleotide
ttgtcgcaggtaactatatgaaatcgttca

SEQ ID NO: 507863 - DNA, 30 bp, Artificial Sequence
  Synthetic oligonucleotide
ccaattaaaacggtcgcgcatgatcgttca

SEQ ID NO: 507864 - DNA, 30 bp, Artificial Sequence
  Synthetic oligonucleotide
taggttcttgcacaccccattgatcgttca

SEQ ID NO: 507865 - DNA, 30 bp, Artificial Sequence
  Synthetic oligonucleotide
attgggtggatcgtgacccgagaaggttca

SEQ ID NO: 507866 - DNA, 30 bp, Artificial Sequence
  Synthetic oligonucleotide
aggagaagctcgtcctatcggtgaggttca

SEQ ID NO: 507867 - DNA, 30 bp, Artificial Sequence
  Synthetic oligonucleotide
aggtaatacggctcgcaacttataggttca

SEQ ID NO: 507868 - DNA, 30 bp, Artificial Sequence
  Synthetic oligonucleotide
cgtctgcagctgctttaccagcacggttca

SEQ ID NO: 507869 - DNA, 30 bp, Artificial Sequence
  Synthetic oligonucleotide
cacaccgtaaataattactacgccggttca

SEQ ID NO: 507870 - DNA, 30 bp, Artificial Sequence
  Synthetic oligonucleotide
gcttgaccgtacgaaagtaacctcggttca

SEQ ID NO: 507871 - DNA, 30 bp, Artificial Sequence
  Synthetic oligonucleotide
aattcaagtggggaactggctaggggttca

SEQ ID NO: 507872 - DNA, 30 bp, Artificial Sequence
  Synthetic oligonucleotide
gaatgccgttgtgaatatcgattgggttca

SEQ ID NO: 507873 - DNA, 30 bp, Artificial Sequence
  Synthetic oligonucleotide
catacgcaagcaggacctagtttgggttca

SEQ ID NO: 507874 - DNA, 30 bp, Artificial Sequence
  Synthetic oligonucleotide
aggaatcagcatgcatcgtgagctggttca

SEQ ID NO: 507875 - DNA, 30 bp, Artificial Sequence
  Synthetic oligonucleotide
ctttgtagtcgaactatcgtacgatgttca

SEQ ID NO: 507876 - DNA, 30 bp, Artificial Sequence
  Synthetic oligonucleotide
agaagactctgcagttcattccattgttca

SEQ ID NO: 507877 - DNA, 30 bp, Artificial Sequence
  Synthetic oligonucleotide
cgggacccttgcgaggcccctagaatttca

SEQ ID NO: 507878 - DNA, 30 bp, Artificial Sequence
  Synthetic oligonucleotide
gttcctttatcattctatccctacatttca

SEQ ID NO: 507879 - DNA, 30 bp, Artificial Sequence
  Synthetic oligonucleotide
atgagttatcttcttgcgcacttcatttca

SEQ ID NO: 507880 - DNA, 30 bp, Artificial Sequence
  Synthetic oligonucleotide
caatatctccctcagatcgaaccgatttca

SEQ ID NO: 507881 - DNA, 30 bp, Artificial Sequence
  Synthetic oligonucleotide
tacctcgcttatggataatgagcgatttca

SEQ ID NO: 507882 - DNA, 30 bp, Artificial Sequence
  Synthetic oligonucleotide
ttccagctgagacagctgctttctatttca

SEQ ID NO: 507883 - DNA, 30 bp, Artificial Sequence
  Synthetic oligonucleotide
atcttaagatcgctgcgtgcctaactttca

SEQ ID NO: 507884 - DNA, 30 bp, Artificial Sequence
  Synthetic oligonucleotide
tatgagttgctgacagtgtccgcactttca

SEQ ID NO: 507885 - DNA, 30 bp, Artificial Sequence
  Synthetic oligonucleotide
gtcaatgtgagctcagaactgaaagtttca

SEQ ID NO: 507886 - DNA, 30 bp, Artificial Sequence
  Synthetic oligonucleotide
aatgagcacatttccacgggtgtagtttca

SEQ ID NO: 507887 - DNA, 30 bp, Artificial Sequence
  Synthetic oligonucleotide
gggagagatttgataaatcctcgcgtttca

SEQ ID NO: 507888 - DNA, 30 bp, Artificial Sequence
  Synthetic oligonucleotide
ctggccaatttcagacttccctcggtttca

SEQ ID NO: 507889 - DNA, 30 bp, Artificial Sequence
  Synthetic oligonucleotide
aattatattagcccaaaagctttggtttca

SEQ ID NO: 507890 - DNA, 30 bp, Artificial Sequence
  Synthetic oligonucleotide
cggaggctttccaaatagcagcatgtttca

SEQ ID NO: 507891 - DNA, 30 bp, Artificial Sequence
  Synthetic oligonucleotide
attcgaattgcaatgttattgtctgtttca

SEQ ID NO: 507892 - DNA, 30 bp, Artificial Sequence
  Synthetic oligonucleotide
tatgtgtgcgaagagtcgcgtggtgtttca

SEQ ID NO: 507893 - DNA, 30 bp, Artificial Sequence
  Synthetic oligonucleotide
cgcatgaatgataatgtagacgtattttca

SEQ ID NO: 507894 - DNA, 30 bp, Artificial Sequence
  Synthetic oligonucleotide
attaaagtttggtgctgcagggtattttca

SEQ ID NO: 507895 - DNA, 30 bp, Artificial Sequence
  Synthetic oligonucleotide
tgtactcgaaagtaaccgcagtatttttca

SEQ ID NO: 507896 - DNA, 30 bp, Artificial Sequence
  Synthetic oligonucleotide
tgttatacagcccatcacttacctttttca

SEQ ID NO: 507897 - DNA, 30 bp, Artificial Sequence
  Synthetic oligonucleotide
gttttcatgggatagtatctctctttttca

SEQ ID NO: 507898 - DNA, 30 bp, Artificial Sequence
  Synthetic oligonucleotide
gtattttccgatactgtgttaggtttttca

SEQ ID NO: 507899 - DNA, 30 bp, Artificial Sequence
  Synthetic oligonucleotide
gaaaaatttactcaacggcccggtttttca

SEQ ID NO: 507900 - DNA, 30 bp, Artificial Sequence
  Synthetic oligonucleotide
agaacgcaatgaaaaagggtctgtttttca

SEQ ID NO: 507901 - DNA, 30 bp, Artificial Sequence
  Synthetic oligonucleotide
atagtattactttggggaaggaaaaaaaga

SEQ ID NO: 507902 - DNA, 30 bp, Artificial Sequence
  Synthetic oligonucleotide
ttaagattctaatatgattatgtaaaaaga

SEQ ID NO: 507903 - DNA, 30 bp, Artificial Sequence
  Synthetic oligonucleotide
ttggttactgtcgatcgaaggcgcaaaaga

SEQ ID NO: 507904 - DNA, 30 bp, Artificial Sequence
  Synthetic oligonucleotide
ggatatccatgcagatccttaggcaaaaga

SEQ ID NO: 507905 - DNA, 30 bp, Artificial Sequence
  Synthetic oligonucleotide
gcctggttatgccaagaaacttgcaaaaga

SEQ ID NO: 507906 - DNA, 30 bp, Artificial Sequence
  Synthetic oligonucleotide
gcttagtactaaaccaacttaaggaaaaga

SEQ ID NO: 507907 - DNA, 30 bp, Artificial Sequence
  Synthetic oligonucleotide
gacactcagcttcccggtttagggaaaaga

SEQ ID NO: 507908 - DNA, 30 bp, Artificial Sequence
  Synthetic oligonucleotide
tgatgtccgtgctcctagttcatgaaaaga

SEQ ID NO: 507909 - DNA, 30 bp, Artificial Sequence
  Synthetic oligonucleotide
gtagcccggccttctgccctcaataaaaga

SEQ ID NO: 507910 - DNA, 30 bp, Artificial Sequence
  Synthetic oligonucleotide
gaagctggggtcactaacaacggtaaaaga

SEQ ID NO: 507911 - DNA, 30 bp, Artificial Sequence
  Synthetic oligonucleotide
gacgcggacgccagttcttggttacaaaga

SEQ ID NO: 507912 - DNA, 30 bp, Artificial Sequence
  Synthetic oligonucleotide
tccacaagaactatcgattaaaaccaaaga

SEQ ID NO: 507913 - DNA, 30 bp, Artificial Sequence
  Synthetic oligonucleotide
tgtcgaggtacgacgcacagtccccaaaga

SEQ ID NO: 507914 - DNA, 30 bp, Artificial Sequence
  Synthetic oligonucleotide
cgatacgtttctgtcaggatacggcaaaga

SEQ ID NO: 507915 - DNA, 30 bp, Artificial Sequence
  Synthetic oligonucleotide
aacgtcacatagcctttatcaaaagaaaga

SEQ ID NO: 507916 - DNA, 30 bp, Artificial Sequence
  Synthetic oligonucleotide
tgtctagggtgcatcgttttatgagaaaga

SEQ ID NO: 507917 - DNA, 30 bp, Artificial Sequence
  Synthetic oligonucleotide
atatttcgaccactatgatgtggcgaaaga

SEQ ID NO: 507918 - DNA, 30 bp, Artificial Sequence
  Synthetic oligonucleotide
taaaagaagaatgagccctgtttcgaaaga

SEQ ID NO: 507919 - DNA, 30 bp, Artificial Sequence
  Synthetic oligonucleotide
acatagagcccctttgggacctatgaaaga

SEQ ID NO: 507920 - DNA, 30 bp, Artificial Sequence
  Synthetic oligonucleotide
gtgtatgctttcaacggttaacctgaaaga

SEQ ID NO: 507921 - DNA, 30 bp, Artificial Sequence
  Synthetic oligonucleotide
ccgaggcagagtggaaaggtaagtgaaaga

SEQ ID NO: 507922 - DNA, 30 bp, Artificial Sequence
  Synthetic oligonucleotide
aaatataattttcccaatatttttgaaaga

SEQ ID NO: 507923 - DNA, 30 bp, Artificial Sequence
  Synthetic oligonucleotide
ctacggcccgcgcaagtaaaaatataaaga

SEQ ID NO: 507924 - DNA, 30 bp, Artificial Sequence
  Synthetic oligonucleotide
cgtgttgctgaaggtacttcgctataaaga

SEQ ID NO: 507925 - DNA, 30 bp, Artificial Sequence
  Synthetic oligonucleotide
gtctcaggggtctttgtgttaagctaaaga

SEQ ID NO: 507926 - DNA, 30 bp, Artificial Sequence
  Synthetic oligonucleotide
aacctgttcccatcgtgagcctcgtaaaga

SEQ ID NO: 507927 - DNA, 30 bp, Artificial Sequence
  Synthetic oligonucleotide
acctgctgggatagccagcacatgtaaaga

SEQ ID NO: 507928 - DNA, 30 bp, Artificial Sequence
  Synthetic oligonucleotide
tcgttacaaccattgccttgattgtaaaga

SEQ ID NO: 507929 - DNA, 30 bp, Artificial Sequence
  Synthetic oligonucleotide
ccaagtgtgtcgtcgctgtcattttaaaga

SEQ ID NO: 507930 - DNA, 30 bp, Artificial Sequence
  Synthetic oligonucleotide
tattaccgttttttaaaataaagaacaaga

SEQ ID NO: 507931 - DNA, 30 bp, Artificial Sequence
  Synthetic oligonucleotide
cgctggctgcggaagggctgacgcacaaga

SEQ ID NO: 507932 - DNA, 30 bp, Artificial Sequence
  Synthetic oligonucleotide
attaagcaggcaagaaatacctcgacaaga

SEQ ID NO: 507933 - DNA, 30 bp, Artificial Sequence
  Synthetic oligonucleotide
agtaacaatgccatgatagtatggacaaga

SEQ ID NO: 507934 - DNA, 30 bp, Artificial Sequence
  Synthetic oligonucleotide
tttctgggttgttaatgagttttgacaaga

SEQ ID NO: 507935 - DNA, 30 bp, Artificial Sequence
  Synthetic oligonucleotide
ttcacactcagcatctcgtgctatacaaga

SEQ ID NO: 507936 - DNA, 30 bp, Artificial Sequence
  Synthetic oligonucleotide
aatcttggaacggtccaagaataaccaaga

SEQ ID NO: 507937 - DNA, 30 bp, Artificial Sequence
  Synthetic oligonucleotide
aagtttcccttccggtccgaagcaccaaga

SEQ ID NO: 507938 - DNA, 30 bp, Artificial Sequence
  Synthetic oligonucleotide
gcgtccggtaaagcttagggctgaccaaga

SEQ ID NO: 507939 - DNA, 30 bp, Artificial Sequence
  Synthetic oligonucleotide
agttggccacaccaaggcctaaacccaaga

SEQ ID NO: 507940 - DNA, 30 bp, Artificial Sequence
  Synthetic oligonucleotide
gctgcacttccgccgttctacctcccaaga

SEQ ID NO: 507941 - DNA, 30 bp, Artificial Sequence
  Synthetic oligonucleotide
ttggcttctggagctcttgggacgccaaga

SEQ ID NO: 507942 - DNA, 30 bp, Artificial Sequence
  Synthetic oligonucleotide
cgttattagcaccatcttggatctccaaga

SEQ ID NO: 507943 - DNA, 30 bp, Artificial Sequence
  Synthetic oligonucleotide
ttaggtggacgggggtggcattctccaaga

SEQ ID NO: 507944 - DNA, 30 bp, Artificial Sequence
  Synthetic oligonucleotide
gcacctagcttggctagcatgtgtccaaga

SEQ ID NO: 507945 - DNA, 30 bp, Artificial Sequence
  Synthetic oligonucleotide
actaaatactcggtgtcccggtaagcaaga

SEQ ID NO: 507946 - DNA, 30 bp, Artificial Sequence
  Synthetic oligonucleotide
ttatgcggcatgatgtctcaatacgcaaga

SEQ ID NO: 507947 - DNA, 30 bp, Artificial Sequence
  Synthetic oligonucleotide
ttttatgattatggggaaagtaccgcaaga

SEQ ID NO: 507948 - DNA, 30 bp, Artificial Sequence
  Synthetic oligonucleotide
attaatcaaaattagacatactcggcaaga

SEQ ID NO: 507949 - DNA, 30 bp, Artificial Sequence
  Synthetic oligonucleotide
tattcccgtcaaaaatcaacgtcggcaaga

SEQ ID NO: 507950 - DNA, 30 bp, Artificial Sequence
  Synthetic oligonucleotide
ttttaacgccgcagaggtctcagggcaaga

SEQ ID NO: 507951 - DNA, 30 bp, Artificial Sequence
  Synthetic oligonucleotide
ggccgactgtttagttgacaggcatcaaga

SEQ ID NO: 507952 - DNA, 30 bp, Artificial Sequence
  Synthetic oligonucleotide
gagggacgggttttatgggaggcatcaaga

SEQ ID NO: 507953 - DNA, 30 bp, Artificial Sequence
  Synthetic oligonucleotide
gtagggggatcattcgacgatgcatcaaga

SEQ ID NO: 507954 - DNA, 30 bp, Artificial Sequence
  Synthetic oligonucleotide
gaggcctgtcttgatcggctggtatcaaga

SEQ ID NO: 507955 - DNA, 30 bp, Artificial Sequence
  Synthetic oligonucleotide
tctagccgctggagctacgtagactcaaga

SEQ ID NO: 507956 - DNA, 30 bp, Artificial Sequence
  Synthetic oligonucleotide
tataggaattgtggttgtcgaagctcaaga

SEQ ID NO: 507957 - DNA, 30 bp, Artificial Sequence
  Synthetic oligonucleotide
tatacagtttggcggtcagttatgtcaaga

SEQ ID NO: 507958 - DNA, 30 bp, Artificial Sequence
  Synthetic oligonucleotide
ctgggaagataccttaaataaatttcaaga

SEQ ID NO: 507959 - DNA, 30 bp, Artificial Sequence
  Synthetic oligonucleotide
cagttatggctttcgctgatgccaagaaga

SEQ ID NO: 507960 - DNA, 30 bp, Artificial Sequence
  Synthetic oligonucleotide
tttatgggatgacgtcagcgtcacagaaga

SEQ ID NO: 507961 - DNA, 30 bp, Artificial Sequence
  Synthetic oligonucleotide
ttttcgcacatttttacgagtggtagaaga

SEQ ID NO: 507962 - DNA, 30 bp, Artificial Sequence
  Synthetic oligonucleotide
aaaattcagttgacgtatcgatgtagaaga

SEQ ID NO: 507963 - DNA, 30 bp, Artificial Sequence
  Synthetic oligonucleotide
tagagcttgccgtatctgagttaacgaaga

SEQ ID NO: 507964 - DNA, 30 bp, Artificial Sequence
  Synthetic oligonucleotide
aacaaagatagactgtaaacaagccgaaga

SEQ ID NO: 507965 - DNA, 30 bp, Artificial Sequence
  Synthetic oligonucleotide
agaccgtaagtaatctgtcgcaggcgaaga

SEQ ID NO: 507966 - DNA, 30 bp, Artificial Sequence
  Synthetic oligonucleotide
ccaagggtagatgactggaatggtcgaaga

SEQ ID NO: 507967 - DNA, 30 bp, Artificial Sequence
  Synthetic oligonucleotide
ggacgcttagcctttggataaagcggaaga

SEQ ID NO: 507968 - DNA, 30 bp, Artificial Sequence
  Synthetic oligonucleotide
ttgcgcacggcataaatgtgaggcggaaga

SEQ ID NO: 507969 - DNA, 30 bp, Artificial Sequence
  Synthetic oligonucleotide
acctttgccaccgtgaaagcccggggaaga

SEQ ID NO: 507970 - DNA, 30 bp, Artificial Sequence
  Synthetic oligonucleotide
tcaatgcggtgcgaggtccctcggggaaga

SEQ ID NO: 507971 - DNA, 30 bp, Artificial Sequence
  Synthetic oligonucleotide
gatcgggtacgagacagtatcaatggaaga

SEQ ID NO: 507972 - DNA, 30 bp, Artificial Sequence
  Synthetic oligonucleotide
gagccgtctggtggccgaggcaggtgaaga

SEQ ID NO: 507973 - DNA, 30 bp, Artificial Sequence
  Synthetic oligonucleotide
gggagtttcacggtcagcttcttttgaaga

SEQ ID NO: 507974 - DNA, 30 bp, Artificial Sequence
  Synthetic oligonucleotide
gagcttggatcatccagataaccaataaga

SEQ ID NO: 507975 - DNA, 30 bp, Artificial Sequence
  Synthetic oligonucleotide
ttttgattgggcgtaggaatgttgataaga

SEQ ID NO: 507976 - DNA, 30 bp, Artificial Sequence
  Synthetic oligonucleotide
gtaatacttatataatagcataatataaga

SEQ ID NO: 507977 - DNA, 30 bp, Artificial Sequence
  Synthetic oligonucleotide
gctacagtatgcaaagcactctatataaga

SEQ ID NO: 507978 - DNA, 30 bp, Artificial Sequence
  Synthetic oligonucleotide
agtctcagggttgaatggggcagcctaaga

SEQ ID NO: 507979 - DNA, 31 bp, Artificial Sequence
  Synthetic oligonucleotide
cccctagggcctactgcgctgcgtgctaaga

SEQ ID NO: 507980 - DNA, 30 bp, Artificial Sequence
  Synthetic oligonucleotide
acagcaaacgtaatagggaaatatctaaga

SEQ ID NO: 507981 - DNA, 30 bp, Artificial Sequence
  Synthetic oligonucleotide
gaatatttatggacgctcagtagtctaaga

SEQ ID NO: 507982 - DNA, 30 bp, Artificial Sequence
  Synthetic oligonucleotide
caggccccgtcatacgccaagcttctaaga

SEQ ID NO: 507983 - DNA, 30 bp, Artificial Sequence
  Synthetic oligonucleotide
tgactatcatctctgggaggctgagtaaga

SEQ ID NO: 507984 - DNA, 30 bp, Artificial Sequence
  Synthetic oligonucleotide
cggttgtccacggcctcggctttagtaaga

SEQ ID NO: 507985 - DNA, 30 bp, Artificial Sequence
  Synthetic oligonucleotide
acctagcgccgcaaatcttgagccgtaaga

SEQ ID NO: 507986 - DNA, 30 bp, Artificial Sequence
  Synthetic oligonucleotide
gccgcaggtggataattaacgggcgtaaga

SEQ ID NO: 507987 - DNA, 30 bp, Artificial Sequence
  Synthetic oligonucleotide
attaatgcctgtagcgcgcagttcgtaaga

SEQ ID NO: 507988 - DNA, 30 bp, Artificial Sequence
  Synthetic oligonucleotide
ggcgtaggtcatcgcggccctaaggtaaga

SEQ ID NO: 507989 - DNA, 30 bp, Artificial Sequence
  Synthetic oligonucleotide
agcagcctagcgaaaattcgtggggtaaga

SEQ ID NO: 507990 - DNA, 30 bp, Artificial Sequence
  Synthetic oligonucleotide
agatttaggaggaagcaatctcctgtaaga

SEQ ID NO: 507991 - DNA, 30 bp, Artificial Sequence
  Synthetic oligonucleotide
atcaaaacacacgtaaacaacccattaaga

SEQ ID NO: 507992 - DNA, 30 bp, Artificial Sequence
  Synthetic oligonucleotide
aattagtttagggacatatgttagttaaga

SEQ ID NO: 507993 - DNA, 30 bp, Artificial Sequence
  Synthetic oligonucleotide
agatcagattttaacgcgaatctgttaaga

SEQ ID NO: 507994 - DNA, 30 bp, Artificial Sequence
  Synthetic oligonucleotide
ttatacctggtctcggggtcttgtttaaga

SEQ ID NO: 507995 - DNA, 31 bp, Artificial Sequence
  Synthetic oligonucleotide
gggtttgctgcaaccgctgatgataaacaga

SEQ ID NO: 507996 - DNA, 30 bp, Artificial Sequence
  Synthetic oligonucleotide
cgacatacactaacgtagagcgacaacaga

SEQ ID NO: 507997 - DNA, 30 bp, Artificial Sequence
  Synthetic oligonucleotide
tgaagtttggttggcttctcaaccaacaga

SEQ ID NO: 507998 - DNA, 30 bp, Artificial Sequence
  Synthetic oligonucleotide
attcagcttgtgaattggacctccaacaga

SEQ ID NO: 507999 - DNA, 27 bp, Artificial Sequence
  Synthetic oligonucleotide
ggatattgcatggactaccggaacaga

SEQ ID NO: 508000 - DNA, 30 bp, Artificial Sequence
  Synthetic oligonucleotide
acttagtatgattaggagcgagtagacaga

SEQ ID NO: 508001 - DNA, 30 bp, Artificial Sequence
  Synthetic oligonucleotide
gtaataacacttccttcagcgttagacaga

SEQ ID NO: 508002 - DNA, 30 bp, Artificial Sequence
  Synthetic oligonucleotide
gttaggcaccggtggtgaacaacggacaga

SEQ ID NO: 508003 - DNA, 30 bp, Artificial Sequence
  Synthetic oligonucleotide
aaaatgtcagacccagggatatatgacaga

SEQ ID NO: 508004 - DNA, 30 bp, Artificial Sequence
  Synthetic oligonucleotide
gtaatgcaaatgataaaaaatcggtacaga

SEQ ID NO: 508005 - DNA, 30 bp, Artificial Sequence
  Synthetic oligonucleotide
caagccactctactaaaccaggctaccaga

SEQ ID NO: 508006 - DNA, 30 bp, Artificial Sequence
  Synthetic oligonucleotide
tttcctaatcacgaggtatttattaccaga

SEQ ID NO: 508007 - DNA, 30 bp, Artificial Sequence
  Synthetic oligonucleotide
ggcctgacatcatctacgacatctcccaga

SEQ ID NO: 508008 - DNA, 30 bp, Artificial Sequence
  Synthetic oligonucleotide
agctgcgcggtagaaacataggaagccaga

SEQ ID NO: 508009 - DNA, 30 bp, Artificial Sequence
  Synthetic oligonucleotide
ggtcacgcgtttgacccggcatgagccaga

SEQ ID NO: 508010 - DNA, 30 bp, Artificial Sequence
  Synthetic oligonucleotide
acatgtcgcatatgtatatagagcgccaga

SEQ ID NO: 508011 - DNA, 30 bp, Artificial Sequence
  Synthetic oligonucleotide
aactggcctgtcctgcatgtacaggccaga

SEQ ID NO: 508012 - DNA, 30 bp, Artificial Sequence
  Synthetic oligonucleotide
aaatcgcccgtgcacaactatctatccaga

SEQ ID NO: 508013 - DNA, 30 bp, Artificial Sequence
  Synthetic oligonucleotide
atcgacgtcaagactcttggtgtgtccaga

SEQ ID NO: 508014 - DNA, 30 bp, Artificial Sequence
  Synthetic oligonucleotide
attcagtactttgttagttattattccaga

SEQ ID NO: 508015 - DNA, 30 bp, Artificial Sequence
  Synthetic oligonucleotide
aaaaaatccatcggctgccatacttccaga

SEQ ID NO: 508016 - DNA, 30 bp, Artificial Sequence
  Synthetic oligonucleotide
acaatgccctggggatgtggcgtaagcaga

SEQ ID NO: 508017 - DNA, 30 bp, Artificial Sequence
  Synthetic oligonucleotide
ttgttgtgggtttatctagaggtaagcaga

SEQ ID NO: 508018 - DNA, 30 bp, Artificial Sequence
  Synthetic oligonucleotide
aaatttttaggatgcgaacgtcgcagcaga

SEQ ID NO: 508019 - DNA, 30 bp, Artificial Sequence
  Synthetic oligonucleotide
tctctcaggcgctctcagtatggcagcaga

SEQ ID NO: 508020 - DNA, 30 bp, Artificial Sequence
  Synthetic oligonucleotide
gatgggctctgaacatcgtaggtcagcaga

SEQ ID NO: 508021 - DNA, 30 bp, Artificial Sequence
  Synthetic oligonucleotide
gcgtgccatcatgcttgtttgattagcaga

SEQ ID NO: 508022 - DNA, 30 bp, Artificial Sequence
  Synthetic oligonucleotide
ccacacatctatattttcctaacacgcaga

SEQ ID NO: 508023 - DNA, 30 bp, Artificial Sequence
  Synthetic oligonucleotide
attcatgacgcacggtcgacagcacgcaga

SEQ ID NO: 508024 - DNA, 30 bp, Artificial Sequence
  Synthetic oligonucleotide
gacagagtacgaaacctttatggacgcaga

SEQ ID NO: 508025 - DNA, 30 bp, Artificial Sequence
  Synthetic oligonucleotide
ttataggtcatttacctatagtttcgcaga

SEQ ID NO: 508026 - DNA, 30 bp, Artificial Sequence
  Synthetic oligonucleotide
ggtgtatagcttaattattttaaaggcaga

SEQ ID NO: 508027 - DNA, 30 bp, Artificial Sequence
  Synthetic oligonucleotide
tggagggcatgcaatggtttaccaggcaga

SEQ ID NO: 508028 - DNA, 30 bp, Artificial Sequence
  Synthetic oligonucleotide
tttaaaaaaaaacacaaatgtagaggcaga

SEQ ID NO: 508029 - DNA, 30 bp, Artificial Sequence
  Synthetic oligonucleotide
cgagtggaccacgggacaacgcgtggcaga

SEQ ID NO: 508030 - DNA, 30 bp, Artificial Sequence
  Synthetic oligonucleotide
ttagccagaatctttggtatgtgatgcaga

SEQ ID NO: 508031 - DNA, 30 bp, Artificial Sequence
  Synthetic oligonucleotide
cgtacgctacatccggtttttccaatcaga

SEQ ID NO: 508032 - DNA, 30 bp, Artificial Sequence
  Synthetic oligonucleotide
caactttgtaagagggatttaagaatcaga

SEQ ID NO: 508033 - DNA, 30 bp, Artificial Sequence
  Synthetic oligonucleotide
aagatacaccctacctattaacgcatcaga

SEQ ID NO: 508034 - DNA, 30 bp, Artificial Sequence
  Synthetic oligonucleotide
gacccgtgtaccacactgaaatgcatcaga

SEQ ID NO: 508035 - DNA, 30 bp, Artificial Sequence
  Synthetic oligonucleotide
ctaaaactagatcgcccatattcgatcaga

SEQ ID NO: 508036 - DNA, 30 bp, Artificial Sequence
  Synthetic oligonucleotide
cttttagactacagttatcgtttgatcaga

SEQ ID NO: 508037 - DNA, 30 bp, Artificial Sequence
  Synthetic oligonucleotide
cacgactcacggatacatacatctatcaga

SEQ ID NO: 508038 - DNA, 30 bp, Artificial Sequence
  Synthetic oligonucleotide
agagctctattgagacgtggcattatcaga

SEQ ID NO: 508039 - DNA, 30 bp, Artificial Sequence
  Synthetic oligonucleotide
gtagagtgacgttgaggcgggatgctcaga

SEQ ID NO: 508040 - DNA, 30 bp, Artificial Sequence
  Synthetic oligonucleotide
ttctctaggccattagcataggatctcaga

SEQ ID NO: 508041 - DNA, 30 bp, Artificial Sequence
  Synthetic oligonucleotide
ctacccgacgccggagagtttccagtcaga

SEQ ID NO: 508042 - DNA, 30 bp, Artificial Sequence
  Synthetic oligonucleotide
cggggagggccaaaagcatccgcagtcaga

SEQ ID NO: 508043 - DNA, 30 bp, Artificial Sequence
  Synthetic oligonucleotide
gataagatgagaccgctaaatgccgtcaga

SEQ ID NO: 508044 - DNA, 30 bp, Artificial Sequence
  Synthetic oligonucleotide
agatgtggccggcaggctacttgcgtcaga

SEQ ID NO: 508045 - DNA, 30 bp, Artificial Sequence
  Synthetic oligonucleotide
ttttatacggaatgccgattactggtcaga

SEQ ID NO: 508046 - DNA, 30 bp, Artificial Sequence
  Synthetic oligonucleotide
gtgtgcattggcctgtcaaagcgtgtcaga

SEQ ID NO: 508047 - DNA, 30 bp, Artificial Sequence
  Synthetic oligonucleotide
cggaatcaggagtgtgacatggaattcaga

SEQ ID NO: 508048 - DNA, 30 bp, Artificial Sequence
  Synthetic oligonucleotide
gatgtttaagtattaatttgtccattcaga

SEQ ID NO: 508049 - DNA, 30 bp, Artificial Sequence
  Synthetic oligonucleotide
ttaaattgttatatttgcttaagattcaga

SEQ ID NO: 508050 - DNA, 30 bp, Artificial Sequence
  Synthetic oligonucleotide
tatttcgatagtattgacgattgcttcaga

SEQ ID NO: 508051 - DNA, 30 bp, Artificial Sequence
  Synthetic oligonucleotide
gtggttagtctcaatgatgacttcttcaga

SEQ ID NO: 508052 - DNA, 30 bp, Artificial Sequence
  Synthetic oligonucleotide
tatctccaaggcgctgtgcgcgaaaagaga

SEQ ID NO: 508053 - DNA, 30 bp, Artificial Sequence
  Synthetic oligonucleotide
ctggtacggacgagccgttacgtaaagaga

SEQ ID NO: 508054 - DNA, 30 bp, Artificial Sequence
  Synthetic oligonucleotide
gtcctataattttataggagtcagaagaga

SEQ ID NO: 508055 - DNA, 30 bp, Artificial Sequence
  Synthetic oligonucleotide
gaacgagcccaaaaggtacacccgaagaga

SEQ ID NO: 508056 - DNA, 30 bp, Artificial Sequence
  Synthetic oligonucleotide
atcggagtggcccatggcagtaataagaga

SEQ ID NO: 508057 - DNA, 30 bp, Artificial Sequence
  Synthetic oligonucleotide
agctgagttttcgctcggtggcttaagaga

SEQ ID NO: 508058 - DNA, 30 bp, Artificial Sequence
  Synthetic oligonucleotide
ctagtatctcttggcgctgtatttaagaga

SEQ ID NO: 508059 - DNA, 30 bp, Artificial Sequence
  Synthetic oligonucleotide
tggtgggtaggacatatttcaaaacagaga

SEQ ID NO: 508060 - DNA, 30 bp, Artificial Sequence
  Synthetic oligonucleotide
ggttatttatctataacttggacacagaga

SEQ ID NO: 508061 - DNA, 30 bp, Artificial Sequence
  Synthetic oligonucleotide
ccactggtagctgaacacgggcgacagaga

SEQ ID NO: 508062 - DNA, 30 bp, Artificial Sequence
  Synthetic oligonucleotide
ggttttgcgcgacccatctctggacagaga

SEQ ID NO: 508063 - DNA, 30 bp, Artificial Sequence
  Synthetic oligonucleotide
taggcggggaggctttagtgaggccagaga

SEQ ID NO: 508064 - DNA, 30 bp, Artificial Sequence
  Synthetic oligonucleotide
ttccgcgtcatatttggactattccagaga

SEQ ID NO: 508065 - DNA, 30 bp, Artificial Sequence
  Synthetic oligonucleotide
gcaacgaagaaagagggaatcaagcagaga

SEQ ID NO: 508066 - DNA, 30 bp, Artificial Sequence
  Synthetic oligonucleotide
tagccctaggttggacgctttcagcagaga

SEQ ID NO: 508067 - DNA, 30 bp, Artificial Sequence
  Synthetic oligonucleotide
gcatactcgcctcagttacaggggcagaga

SEQ ID NO: 508068 - DNA, 30 bp, Artificial Sequence
  Synthetic oligonucleotide
cgcggctaacgttgcacatctgggcagaga

SEQ ID NO: 508069 - DNA, 30 bp, Artificial Sequence
  Synthetic oligonucleotide
atagagatgagcaaaactttgatgcagaga

SEQ ID NO: 508070 - DNA, 30 bp, Artificial Sequence
  Synthetic oligonucleotide
gaccccaaagcgtttagccggggtcagaga

SEQ ID NO: 508071 - DNA, 30 bp, Artificial Sequence
  Synthetic oligonucleotide
cgaaggaatcatatctcgccccaagagaga

SEQ ID NO: 508072 - DNA, 30 bp, Artificial Sequence
  Synthetic oligonucleotide
tgagagtcctttaaggccatgctcgagaga

SEQ ID NO: 508073 - DNA, 30 bp, Artificial Sequence
  Synthetic oligonucleotide
tgaagcggcaaactcaacaaacaggagaga

SEQ ID NO: 508074 - DNA, 30 bp, Artificial Sequence
  Synthetic oligonucleotide
agatcatcatggcaagactgctgggagaga

SEQ ID NO: 508075 - DNA, 30 bp, Artificial Sequence
  Synthetic oligonucleotide
gtttatattttacatgtaaatcgtgagaga

SEQ ID NO: 508076 - DNA, 30 bp, Artificial Sequence
  Synthetic oligonucleotide
gggctgggcggagtacttcacacatagaga

SEQ ID NO: 508077 - DNA, 30 bp, Artificial Sequence
  Synthetic oligonucleotide
agctgctatccggttccagccgcatagaga

SEQ ID NO: 508078 - DNA, 30 bp, Artificial Sequence
  Synthetic oligonucleotide
atctgacgtcctagctgggcgtgatagaga

SEQ ID NO: 508079 - DNA, 30 bp, Artificial Sequence
  Synthetic oligonucleotide
gggacccgacgttagcttactttatagaga

SEQ ID NO: 508080 - DNA, 30 bp, Artificial Sequence
  Synthetic oligonucleotide
gggatatttcgttgaagtcttttatagaga

SEQ ID NO: 508081 - DNA, 30 bp, Artificial Sequence
  Synthetic oligonucleotide
agcatgcttagacgcattgataactagaga

SEQ ID NO: 508082 - DNA, 30 bp, Artificial Sequence
  Synthetic oligonucleotide
agggtccgtttgtcaatttatgcctagaga

SEQ ID NO: 508083 - DNA, 30 bp, Artificial Sequence
  Synthetic oligonucleotide
actggaccagcgccgttttcagcaacgaga

SEQ ID NO: 508084 - DNA, 30 bp, Artificial Sequence
  Synthetic oligonucleotide
aacgctcggcatagatcgtattaaccgaga

SEQ ID NO: 508085 - DNA, 30 bp, Artificial Sequence
  Synthetic oligonucleotide
catttgttcttattcacagctagaccgaga

SEQ ID NO: 508086 - DNA, 30 bp, Artificial Sequence
  Synthetic oligonucleotide
tatctcgatcgatcgtttcacgcgccgaga

SEQ ID NO: 508087 - DNA, 30 bp, Artificial Sequence
  Synthetic oligonucleotide
ccatcaggctaaggtcaaccccgtccgaga

SEQ ID NO: 508088 - DNA, 30 bp, Artificial Sequence
  Synthetic oligonucleotide
gcgcacattttcaagtaacgggttccgaga

SEQ ID NO: 508089 - DNA, 30 bp, Artificial Sequence
  Synthetic oligonucleotide
cgtgcagcgttgtagtgtctggaagcgaga

SEQ ID NO: 508090 - DNA, 30 bp, Artificial Sequence
  Synthetic oligonucleotide
atctataagacaccggataattctgcgaga

SEQ ID NO: 508091 - DNA, 30 bp, Artificial Sequence
  Synthetic oligonucleotide
tgcgcatgaccgtactcagcttttgcgaga

SEQ ID NO: 508092 - DNA, 30 bp, Artificial Sequence
  Synthetic oligonucleotide
gttaaacgcgtataacgggctgactcgaga

SEQ ID NO: 508093 - DNA, 30 bp, Artificial Sequence
  Synthetic oligonucleotide
atttataggtgcattattgcatcctcgaga

SEQ ID NO: 508094 - DNA, 30 bp, Artificial Sequence
  Synthetic oligonucleotide
ggcccttcttggaacacgcagcggtcgaga

SEQ ID NO: 508095 - DNA, 30 bp, Artificial Sequence
  Synthetic oligonucleotide
ctccaatctgcggatttccggtggtcgaga

SEQ ID NO: 508096 - DNA, 30 bp, Artificial Sequence
  Synthetic oligonucleotide
agtgacacgttcggcactgggtattcgaga

SEQ ID NO: 508097 - DNA, 30 bp, Artificial Sequence
  Synthetic oligonucleotide
tatttgtgcccgtagggactggtttcgaga

SEQ ID NO: 508098 - DNA, 30 bp, Artificial Sequence
  Synthetic oligonucleotide
ctgaagtgggtgtatggaaggtaaaggaga

SEQ ID NO: 508099 - DNA, 30 bp, Artificial Sequence
  Synthetic oligonucleotide
cccagaacatcgtggtttccatacaggaga

SEQ ID NO: 508100 - DNA, 30 bp, Artificial Sequence
  Synthetic oligonucleotide
attctagctcgccatgcgctcgtcaggaga

SEQ ID NO: 508101 - DNA, 30 bp, Artificial Sequence
  Synthetic oligonucleotide
taggatggttatggttgtgcgttcaggaga

SEQ ID NO: 508102 - DNA, 30 bp, Artificial Sequence
  Synthetic oligonucleotide
gcagactacacagcacgcagctataggaga

SEQ ID NO: 508103 - DNA, 30 bp, Artificial Sequence
  Synthetic oligonucleotide
agtacggtggcggaggtcttgacacggaga

SEQ ID NO: 508104 - DNA, 30 bp, Artificial Sequence
  Synthetic oligonucleotide
gtgatatgaatgggctaagattcacggaga

SEQ ID NO: 508105 - DNA, 30 bp, Artificial Sequence
  Synthetic oligonucleotide
ataaacatgtcgacttcctagtgacggaga

SEQ ID NO: 508106 - DNA, 30 bp, Artificial Sequence
  Synthetic oligonucleotide
cccagttcttcgactcagtcagtacggaga

SEQ ID NO: 508107 - DNA, 30 bp, Artificial Sequence
  Synthetic oligonucleotide
ttcaacgggctgatgtgaaatacccggaga

SEQ ID NO: 508108 - DNA, 30 bp, Artificial Sequence
  Synthetic oligonucleotide
tcaaacggtatcaagccctgtaatcggaga

SEQ ID NO: 508109 - DNA, 29 bp, Artificial Sequence
  Synthetic oligonucleotide
tcgctatggtcgcggtctaggaagggaga

SEQ ID NO: 508110 - DNA, 25 bp, Artificial Sequence
  Synthetic oligonucleotide
tagtttacgagtaaagtaagggaga

SEQ ID NO: 508111 - DNA, 30 bp, Artificial Sequence
  Synthetic oligonucleotide
cagttcatttcaccctctgttaacgggaga

SEQ ID NO: 508112 - DNA, 40 bp, Artificial Sequence
  Synthetic oligonucleotide
aagataatacatgcatggtatggtcggggatcgggggaga

SEQ ID NO: 508113 - DNA, 30 bp, Artificial Sequence
  Synthetic oligonucleotide
ccttatgagctatggtagctcggggggaga

SEQ ID NO: 508114 - DNA, 30 bp, Artificial Sequence
  Synthetic oligonucleotide
tcgtcaaggtctggcagtagtaatgggaga

SEQ ID NO: 508115 - DNA, 30 bp, Artificial Sequence
  Synthetic oligonucleotide
aatcgatcaagacaaacgcggcctgggaga

SEQ ID NO: 508116 - DNA, 30 bp, Artificial Sequence
  Synthetic oligonucleotide
atcgcgccccacgggaagaggtctgggaga

SEQ ID NO: 508117 - DNA, 30 bp, Artificial Sequence
  Synthetic oligonucleotide
catggagtagtgggaggcacgacgtggaga

SEQ ID NO: 508118 - DNA, 30 bp, Artificial Sequence
  Synthetic oligonucleotide
cgtagcatccatgacatctccaaaatgaga

SEQ ID NO: 508119 - DNA, 30 bp, Artificial Sequence
  Synthetic oligonucleotide
gcacacgtcagctcatttgtctcaatgaga

SEQ ID NO: 508120 - DNA, 30 bp, Artificial Sequence
  Synthetic oligonucleotide
acccggcagggttttagaaccataatgaga

SEQ ID NO: 508121 - DNA, 30 bp, Artificial Sequence
  Synthetic oligonucleotide
cgcactgtttcacgatgagtactcatgaga

SEQ ID NO: 508122 - DNA, 30 bp, Artificial Sequence
  Synthetic oligonucleotide
gcggcgttgcaagggtcatcaggactgaga

SEQ ID NO: 508123 - DNA, 30 bp, Artificial Sequence
  Synthetic oligonucleotide
tatgtaaagcttaccagtgtatgactgaga

SEQ ID NO: 508124 - DNA, 30 bp, Artificial Sequence
  Synthetic oligonucleotide
taggtacttgcgcagcacaacagtctgaga

SEQ ID NO: 508125 - DNA, 30 bp, Artificial Sequence
  Synthetic oligonucleotide
agctcattctactcagtggatagtctgaga

SEQ ID NO: 508126 - DNA, 30 bp, Artificial Sequence
  Synthetic oligonucleotide
ataggagggctaagtggaagtggtctgaga

SEQ ID NO: 508127 - DNA, 30 bp, Artificial Sequence
  Synthetic oligonucleotide
tattaataatatggagaggttccagtgaga

SEQ ID NO: 508128 - DNA, 30 bp, Artificial Sequence
  Synthetic oligonucleotide
tccgctatcgacgctagaaagatagtgaga

SEQ ID NO: 508129 - DNA, 30 bp, Artificial Sequence
  Synthetic oligonucleotide
gaacaccctacaaggcactccgacgtgaga

SEQ ID NO: 508130 - DNA, 30 bp, Artificial Sequence
  Synthetic oligonucleotide
tggttgtcgattctgcgaagcactgtgaga

SEQ ID NO: 508131 - DNA, 30 bp, Artificial Sequence
  Synthetic oligonucleotide
gagtacacggggcttgtagcctctgtgaga

SEQ ID NO: 508132 - DNA, 30 bp, Artificial Sequence
  Synthetic oligonucleotide
aatgggttagccgaggagtttgaattgaga

SEQ ID NO: 508133 - DNA, 30 bp, Artificial Sequence
  Synthetic oligonucleotide
aacgtacttctccacttcaccgcattgaga

SEQ ID NO: 508134 - DNA, 30 bp, Artificial Sequence
  Synthetic oligonucleotide
ctatacagtcattagatgcgttacttgaga

SEQ ID NO: 508135 - DNA, 30 bp, Artificial Sequence
  Synthetic oligonucleotide
tcaaaccgtggctcggatataagcttgaga

SEQ ID NO: 508136 - DNA, 30 bp, Artificial Sequence
  Synthetic oligonucleotide
caacacacggtggggttatgcggcttgaga

SEQ ID NO: 508137 - DNA, 31 bp, Artificial Sequence
  Synthetic oligonucleotide
taccaggtgttattcaacagcttgcttgaga

SEQ ID NO: 508138 - DNA, 30 bp, Artificial Sequence
  Synthetic oligonucleotide
gaagttataaaggcgtacgcgtggttgaga

SEQ ID NO: 508139 - DNA, 30 bp, Artificial Sequence
  Synthetic oligonucleotide
aaagagcctaatcctttgaccaatttgaga

SEQ ID NO: 508140 - DNA, 30 bp, Artificial Sequence
  Synthetic oligonucleotide
tgttagaacccgcatgtctgacctttgaga

SEQ ID NO: 508141 - DNA, 30 bp, Artificial Sequence
  Synthetic oligonucleotide
ctaccttgaatcattccgaacgctttgaga

SEQ ID NO: 508142 - DNA, 30 bp, Artificial Sequence
  Synthetic oligonucleotide
tatgcttgtatcccggctgcgtgtttgaga

SEQ ID NO: 508143 - DNA, 30 bp, Artificial Sequence
  Synthetic oligonucleotide
ttccgttggattgtttttggggttttgaga

SEQ ID NO: 508144 - DNA, 30 bp, Artificial Sequence
  Synthetic oligonucleotide
gatgagtaagcaacttcacatgttttgaga

SEQ ID NO: 508145 - DNA, 30 bp, Artificial Sequence
  Synthetic oligonucleotide
gattcatttcgcgatctcagccaaaataga

SEQ ID NO: 508146 - DNA, 30 bp, Artificial Sequence
  Synthetic oligonucleotide
gcccgaaaaacaagcgatcggggcaataga

SEQ ID NO: 508147 - DNA, 30 bp, Artificial Sequence
  Synthetic oligonucleotide
ggtgcaagctcccatgatgcttgcaataga

SEQ ID NO: 508148 - DNA, 30 bp, Artificial Sequence
  Synthetic oligonucleotide
gtcccacatgcagcttctctgacgaataga

SEQ ID NO: 508149 - DNA, 30 bp, Artificial Sequence
  Synthetic oligonucleotide
accgacacagtcgggacttttgggaataga

SEQ ID NO: 508150 - DNA, 30 bp, Artificial Sequence
  Synthetic oligonucleotide
ccgtataatcacgcgcactaatggaataga

SEQ ID NO: 508151 - DNA, 30 bp, Artificial Sequence
  Synthetic oligonucleotide
cgaagatcgagtgtgtcctttatgaataga

SEQ ID NO: 508152 - DNA, 30 bp, Artificial Sequence
  Synthetic oligonucleotide
attttccatattggtataatcagtaataga

SEQ ID NO: 508153 - DNA, 30 bp, Artificial Sequence
  Synthetic oligonucleotide
ccccggcagtcgaccggtctctaacataga

SEQ ID NO: 508154 - DNA, 30 bp, Artificial Sequence
  Synthetic oligonucleotide
aggtacctctacgagtcacagtaacataga

SEQ ID NO: 508155 - DNA, 30 bp, Artificial Sequence
  Synthetic oligonucleotide
aagtcgggctgccgacgatagacacataga

SEQ ID NO: 508156 - DNA, 30 bp, Artificial Sequence
  Synthetic oligonucleotide
ctcgtttagcacattgatgccgcacataga

SEQ ID NO: 508157 - DNA, 30 bp, Artificial Sequence
  Synthetic oligonucleotide
tatatgcaacgcagctgcagggcccataga

SEQ ID NO: 508158 - DNA, 30 bp, Artificial Sequence
  Synthetic oligonucleotide
ggaaacatcctactctattgtagccataga

SEQ ID NO: 508159 - DNA, 30 bp, Artificial Sequence
  Synthetic oligonucleotide
cgcatgcatctacgttactgggcgcataga

SEQ ID NO: 508160 - DNA, 30 bp, Artificial Sequence
  Synthetic oligonucleotide
aaattccgtttttgtacgccatggcataga

SEQ ID NO: 508161 - DNA, 30 bp, Artificial Sequence
  Synthetic oligonucleotide
ggatagcctttatagttgttgatgcataga

SEQ ID NO: 508162 - DNA, 30 bp, Artificial Sequence
  Synthetic oligonucleotide
gtagagttagcgttggagactaaagataga

SEQ ID NO: 508163 - DNA, 30 bp, Artificial Sequence
  Synthetic oligonucleotide
catctcgtatccacaattgtttaagataga

SEQ ID NO: 508164 - DNA, 30 bp, Artificial Sequence
  Synthetic oligonucleotide
ctcccttaatcttattcgcgaacagataga

SEQ ID NO: 508165 - DNA, 30 bp, Artificial Sequence
  Synthetic oligonucleotide
ataatgaaactgaagagcacctgggataga

SEQ ID NO: 508166 - DNA, 30 bp, Artificial Sequence
  Synthetic oligonucleotide
gagttttaaatccgcggacgtcatgataga

SEQ ID NO: 508167 - DNA, 30 bp, Artificial Sequence
  Synthetic oligonucleotide
aacgcgcgtcacaactaacctagtgataga

SEQ ID NO: 508168 - DNA, 30 bp, Artificial Sequence
  Synthetic oligonucleotide
ttggagcacattgtacgggcaacatataga

SEQ ID NO: 508169 - DNA, 30 bp, Artificial Sequence
  Synthetic oligonucleotide
cccgctctcgttacaaatgtacgatataga

SEQ ID NO: 508170 - DNA, 30 bp, Artificial Sequence
  Synthetic oligonucleotide
cctttgttccgaagaaatattatatataga

SEQ ID NO: 508171 - DNA, 30 bp, Artificial Sequence
  Synthetic oligonucleotide
ggttgaaacgaagtggaaaacttatataga

SEQ ID NO: 508172 - DNA, 30 bp, Artificial Sequence
  Synthetic oligonucleotide
atattagtaaaaccgagacaatcgtataga

SEQ ID NO: 508173 - DNA, 30 bp, Artificial Sequence
  Synthetic oligonucleotide
gctgttcttggacctcctattgggtataga

SEQ ID NO: 508174 - DNA, 30 bp, Artificial Sequence
  Synthetic oligonucleotide
taaactagggatgatcaggtgatgtataga

SEQ ID NO: 508175 - DNA, 30 bp, Artificial Sequence
  Synthetic oligonucleotide
caagtagaagcttttgagatagcttataga

SEQ ID NO: 508176 - DNA, 30 bp, Artificial Sequence
  Synthetic oligonucleotide
ctttggtttgaacgcgtgtgaatttataga

SEQ ID NO: 508177 - DNA, 30 bp, Artificial Sequence
  Synthetic oligonucleotide
ttttcttttagcgggaaatttgaaactaga

SEQ ID NO: 508178 - DNA, 30 bp, Artificial Sequence
  Synthetic oligonucleotide
tagtagcactaattctaggggggaactaga

SEQ ID NO: 508179 - DNA, 30 bp, Artificial Sequence
  Synthetic oligonucleotide
taagtttgtatcttttaccgtgccactaga

SEQ ID NO: 508180 - DNA, 30 bp, Artificial Sequence
  Synthetic oligonucleotide
tgggctgatgcagcgtaagcaggcactaga

SEQ ID NO: 508181 - DNA, 30 bp, Artificial Sequence
  Synthetic oligonucleotide
acaggacaaaaccacacccgtcagactaga

SEQ ID NO: 508182 - DNA, 30 bp, Artificial Sequence
  Synthetic oligonucleotide
cttaccgcatatgcaccaaatcttactaga

SEQ ID NO: 508183 - DNA, 30 bp, Artificial Sequence
  Synthetic oligonucleotide
gattgtgatgcaggttgacctcttactaga

SEQ ID NO: 508184 - DNA, 30 bp, Artificial Sequence
  Synthetic oligonucleotide
tagtactcagccggtaaaatctaacctaga

SEQ ID NO: 508185 - DNA, 30 bp, Artificial Sequence
  Synthetic oligonucleotide
tgtggtagtcggtaaacggtggtacctaga

SEQ ID NO: 508186 - DNA, 30 bp, Artificial Sequence
  Synthetic oligonucleotide
atttagccccgattccattggatgcctaga

SEQ ID NO: 508187 - DNA, 30 bp, Artificial Sequence
  Synthetic oligonucleotide
cgcaaggagggttaaaggcgcttgcctaga

SEQ ID NO: 508188 - DNA, 30 bp, Artificial Sequence
  Synthetic oligonucleotide
aacccaggggtacacgggtatccagctaga

SEQ ID NO: 508189 - DNA, 30 bp, Artificial Sequence
  Synthetic oligonucleotide
taccgcaaatattgttgcaagcgagctaga

SEQ ID NO: 508190 - DNA, 30 bp, Artificial Sequence
  Synthetic oligonucleotide
taatgtccgatacaccaagtcgtagctaga

SEQ ID NO: 508191 - DNA, 30 bp, Artificial Sequence
  Synthetic oligonucleotide
ggaatgcacatgcgagtttttagcgctaga

SEQ ID NO: 508192 - DNA, 30 bp, Artificial Sequence
  Synthetic oligonucleotide
gagacttcagcatattggtggatcgctaga

SEQ ID NO: 508193 - DNA, 30 bp, Artificial Sequence
  Synthetic oligonucleotide
tcattaagaactgtgcaattgttcgctaga

SEQ ID NO: 508194 - DNA, 30 bp, Artificial Sequence
  Synthetic oligonucleotide
ctagcacttttcgaatgaaaaagggctaga

SEQ ID NO: 508195 - DNA, 30 bp, Artificial Sequence
  Synthetic oligonucleotide
attcatcagtcagttgaaacatgggctaga

SEQ ID NO: 508196 - DNA, 30 bp, Artificial Sequence
  Synthetic oligonucleotide
aagagaatgggcaacgtggtgccatctaga

SEQ ID NO: 508197 - DNA, 30 bp, Artificial Sequence
  Synthetic oligonucleotide
gatgtttggggccgctgaacgttgtctaga

SEQ ID NO: 508198 - DNA, 30 bp, Artificial Sequence
  Synthetic oligonucleotide
tgtagccttgcagcgttattcaccagtaga

SEQ ID NO: 508199 - DNA, 30 bp, Artificial Sequence
  Synthetic oligonucleotide
tgaatggagcatactagacagcggagtaga

SEQ ID NO: 508200 - DNA, 29 bp, Artificial Sequence
  Synthetic oligonucleotide
aggtttgctggcactctggtcggagtaga

SEQ ID NO: 508201 - DNA, 30 bp, Artificial Sequence
  Synthetic oligonucleotide
tttagcgtcaccaacctcaatatgagtaga

SEQ ID NO: 508202 - DNA, 30 bp, Artificial Sequence
  Synthetic oligonucleotide
tcagcgcaggatcagagcggactgagtaga

SEQ ID NO: 508203 - DNA, 30 bp, Artificial Sequence
  Synthetic oligonucleotide
atttgttatggcctcatgttggatagtaga

SEQ ID NO: 508204 - DNA, 30 bp, Artificial Sequence
  Synthetic oligonucleotide
aactttaccttcgtagtaggtactagtaga

SEQ ID NO: 508205 - DNA, 30 bp, Artificial Sequence
  Synthetic oligonucleotide
tttttgctcgcgcgatgcataaaacgtaga

SEQ ID NO: 508206 - DNA, 30 bp, Artificial Sequence
  Synthetic oligonucleotide
gaaggggtctcataagtcgccgaccgtaga

SEQ ID NO: 508207 - DNA, 30 bp, Artificial Sequence
  Synthetic oligonucleotide
gagtcgccacggctactaacaatccgtaga

SEQ ID NO: 508208 - DNA, 30 bp, Artificial Sequence
  Synthetic oligonucleotide
cgaccggccggaccttagtctcgaggtaga

SEQ ID NO: 508209 - DNA, 30 bp, Artificial Sequence
  Synthetic oligonucleotide
ataatacaggttctaataggtcacggtaga

SEQ ID NO: 508210 - DNA, 30 bp, Artificial Sequence
  Synthetic oligonucleotide
tctagtggttattagttaaagacgggtaga

SEQ ID NO: 508211 - DNA, 30 bp, Artificial Sequence
  Synthetic oligonucleotide
caagtagtccagctactgccaaggggtaga

SEQ ID NO: 508212 - DNA, 30 bp, Artificial Sequence
  Synthetic oligonucleotide
agctctatggggtctgaggaccatggtaga

SEQ ID NO: 508213 - DNA, 30 bp, Artificial Sequence
  Synthetic oligonucleotide
gaaattacggttgaatcctgaagtggtaga

SEQ ID NO: 508214 - DNA, 30 bp, Artificial Sequence
  Synthetic oligonucleotide
aatgacttttacacggcgctgattggtaga

SEQ ID NO: 508215 - DNA, 30 bp, Artificial Sequence
  Synthetic oligonucleotide
agctcagaccctacctttcgcccatgtaga

SEQ ID NO: 508216 - DNA, 30 bp, Artificial Sequence
  Synthetic oligonucleotide
ggtgatgcaaaggccaagagaggatgtaga

SEQ ID NO: 508217 - DNA, 30 bp, Artificial Sequence
  Synthetic oligonucleotide
acgtcgggctataatcaccaactatgtaga

SEQ ID NO: 508218 - DNA, 30 bp, Artificial Sequence
  Synthetic oligonucleotide
cgtttgtttccgaatggattgcgctgtaga

SEQ ID NO: 508219 - DNA, 30 bp, Artificial Sequence
  Synthetic oligonucleotide
caaatatcgcaatgggttcctgtctgtaga

SEQ ID NO: 508220 - DNA, 30 bp, Artificial Sequence
  Synthetic oligonucleotide
tcgactagcaccttagaagcatcgtgtaga

SEQ ID NO: 508221 - DNA, 30 bp, Artificial Sequence
  Synthetic oligonucleotide
tggctaaacgagtgagggatgaggtgtaga

SEQ ID NO: 508222 - DNA, 30 bp, Artificial Sequence
  Synthetic oligonucleotide
ataataacgggtctacgacgccacattaga

SEQ ID NO: 508223 - DNA, 30 bp, Artificial Sequence
  Synthetic oligonucleotide
ctcgatttgaccgacaacgcttacattaga

SEQ ID NO: 508224 - DNA, 30 bp, Artificial Sequence
  Synthetic oligonucleotide
cagtaattactatttgtatccagcattaga

SEQ ID NO: 508225 - DNA, 30 bp, Artificial Sequence
  Synthetic oligonucleotide
attttaagcatggtagtattttgcattaga

SEQ ID NO: 508226 - DNA, 30 bp, Artificial Sequence
  Synthetic oligonucleotide
gtgacccctttcatattggacaagattaga

SEQ ID NO: 508227 - DNA, 30 bp, Artificial Sequence
  Synthetic oligonucleotide
taagcgagttcccgcgtgcatcaacttaga

SEQ ID NO: 508228 - DNA, 30 bp, Artificial Sequence
  Synthetic oligonucleotide
ccaacctcctgttcatgcgcaggacttaga

SEQ ID NO: 508229 - DNA, 30 bp, Artificial Sequence
  Synthetic oligonucleotide
tgagcagaattggtaagataaacccttaga

SEQ ID NO: 508230 - DNA, 30 bp, Artificial Sequence
  Synthetic oligonucleotide
atgactgcctccagtcagaatgcccttaga

SEQ ID NO: 508231 - DNA, 30 bp, Artificial Sequence
  Synthetic oligonucleotide
caaaactatgatctcattaccgtccttaga

SEQ ID NO: 508232 - DNA, 30 bp, Artificial Sequence
  Synthetic oligonucleotide
gaagtgatgcccatccttggtactcttaga

SEQ ID NO: 508233 - DNA, 30 bp, Artificial Sequence
  Synthetic oligonucleotide
gaggggccaccttgcagcgaatctcttaga

SEQ ID NO: 508234 - DNA, 30 bp, Artificial Sequence
  Synthetic oligonucleotide
tgttggacaaactgcataacgtgcgttaga

SEQ ID NO: 508235 - DNA, 30 bp, Artificial Sequence
  Synthetic oligonucleotide
ttatctgtggacctcgtgacatctgttaga

SEQ ID NO: 508236 - DNA, 30 bp, Artificial Sequence
  Synthetic oligonucleotide
aacctggaggccagctatagttctgttaga

SEQ ID NO: 508237 - DNA, 30 bp, Artificial Sequence
  Synthetic oligonucleotide
ttttcggtaactttccccgaaattgttaga

SEQ ID NO: 508238 - DNA, 30 bp, Artificial Sequence
  Synthetic oligonucleotide
tctcttatttggaggtgcagtcttgttaga

SEQ ID NO: 508239 - DNA, 30 bp, Artificial Sequence
  Synthetic oligonucleotide
gggctccaacattgctcatggaaatttaga

SEQ ID NO: 508240 - DNA, 30 bp, Artificial Sequence
  Synthetic oligonucleotide
ggtaaaatgtcagctgccttcgtctttaga

SEQ ID NO: 508241 - DNA, 29 bp, Artificial Sequence
  Synthetic oligonucleotide
tccaggaatgccaaaaactggtctttaga

SEQ ID NO: 508242 - DNA, 30 bp, Artificial Sequence
  Synthetic oligonucleotide
aacgtaatgtaggactcggtttagtttaga

SEQ ID NO: 508243 - DNA, 30 bp, Artificial Sequence
  Synthetic oligonucleotide
aaatcgttccgcagcgacgacatgtttaga

SEQ ID NO: 508244 - DNA, 30 bp, Artificial Sequence
  Synthetic oligonucleotide
ggtgttcatcatattttcaaggtttttaga

SEQ ID NO: 508245 - DNA, 30 bp, Artificial Sequence
  Synthetic oligonucleotide
gtagctagagatatgtagggcttttttaga

SEQ ID NO: 508246 - DNA, 30 bp, Artificial Sequence
  Synthetic oligonucleotide
ctaggagtgggttggtattcgcaaaaacga

SEQ ID NO: 508247 - DNA, 30 bp, Artificial Sequence
  Synthetic oligonucleotide
acattgacacagtaagggcgttaaaaacga

SEQ ID NO: 508248 - DNA, 30 bp, Artificial Sequence
  Synthetic oligonucleotide
gtttcctgcccgtaaccaggcgtaaaacga

SEQ ID NO: 508249 - DNA, 30 bp, Artificial Sequence
  Synthetic oligonucleotide
gcaacaatgatgtctaataaacacaaacga

SEQ ID NO: 508250 - DNA, 30 bp, Artificial Sequence
  Synthetic oligonucleotide
cgaggtgaatcatggagcggccacaaacga

SEQ ID NO: 508251 - DNA, 30 bp, Artificial Sequence
  Synthetic oligonucleotide
tatgtacgataggaaccacccgccaaacga

SEQ ID NO: 508252 - DNA, 30 bp, Artificial Sequence
  Synthetic oligonucleotide
aaatggagagtacgcagaatcagacaacga

SEQ ID NO: 508253 - DNA, 30 bp, Artificial Sequence
  Synthetic oligonucleotide
gtagcccggtgtgtcggctactgacaacga

SEQ ID NO: 508254 - DNA, 30 bp, Artificial Sequence
  Synthetic oligonucleotide
cggccgggactataaagtcgatcgcaacga

SEQ ID NO: 508255 - DNA, 30 bp, Artificial Sequence
  Synthetic oligonucleotide
taagccccggagtgaattgatcggcaacga

SEQ ID NO: 508256 - DNA, 30 bp, Artificial Sequence
  Synthetic oligonucleotide
tgttgttagacaggcgagaatgaagaacga

SEQ ID NO: 508257 - DNA, 30 bp, Artificial Sequence
  Synthetic oligonucleotide
acattaacacgtggtcaggcaatcgaacga

SEQ ID NO: 508258 - DNA, 30 bp, Artificial Sequence
  Synthetic oligonucleotide
gcagcaatacctcaactatggtatgaacga

SEQ ID NO: 508259 - DNA, 30 bp, Artificial Sequence
  Synthetic oligonucleotide
ggaggattatagcgaggcagctaataacga

SEQ ID NO: 508260 - DNA, 30 bp, Artificial Sequence
  Synthetic oligonucleotide
gtgagcaactcgggaagaaaattataacga

SEQ ID NO: 508261 - DNA, 30 bp, Artificial Sequence
  Synthetic oligonucleotide
atcggttccaacgtaaggacaggctaacga

SEQ ID NO: 508262 - DNA, 30 bp, Artificial Sequence
  Synthetic oligonucleotide
aagtaagagctcgcgcatcctgtctaacga

SEQ ID NO: 508263 - DNA, 30 bp, Artificial Sequence
  Synthetic oligonucleotide
tagcggggtgccccttcgctgcgaacacga

SEQ ID NO: 508264 - DNA, 30 bp, Artificial Sequence
  Synthetic oligonucleotide
acaatagttttcggatcctctcacacacga

SEQ ID NO: 508265 - DNA, 30 bp, Artificial Sequence
  Synthetic oligonucleotide
tttggtctacgtggttcgtctgtcacacga

SEQ ID NO: 508266 - DNA, 30 bp, Artificial Sequence
  Synthetic oligonucleotide
agccttcattctactcagcatgaaccacga

SEQ ID NO: 508267 - DNA, 30 bp, Artificial Sequence
  Synthetic oligonucleotide
ttgccatatgccggcgccctcgagccacga

SEQ ID NO: 508268 - DNA, 30 bp, Artificial Sequence
  Synthetic oligonucleotide
ggactcaatgcgactcagacatcgccacga

SEQ ID NO: 508269 - DNA, 30 bp, Artificial Sequence
  Synthetic oligonucleotide
atgggggtatggccaaccccattgccacga

SEQ ID NO: 508270 - DNA, 31 bp, Artificial Sequence
  Synthetic oligonucleotide
acccggtggtcctcaaggatcgttgccacga

SEQ ID NO: 508271 - DNA, 30 bp, Artificial Sequence
  Synthetic oligonucleotide
gactttttattggcggagatctgagcacga

SEQ ID NO: 508272 - DNA, 30 bp, Artificial Sequence
  Synthetic oligonucleotide
ccggtcgctactacaccagggcacgcacga

SEQ ID NO: 508273 - DNA, 30 bp, Artificial Sequence
  Synthetic oligonucleotide
attgatgcaccggaagcgagactcgcacga

SEQ ID NO: 508274 - DNA, 30 bp, Artificial Sequence
  Synthetic oligonucleotide
tccatagtaatgtaacgtcacttcgcacga

SEQ ID NO: 508275 - DNA, 30 bp, Artificial Sequence
  Synthetic oligonucleotide
tcttgcggtcatgtgctaggggtggcacga

SEQ ID NO: 508276 - DNA, 30 bp, Artificial Sequence
  Synthetic oligonucleotide
aggtggtaggacaaaaagtagtatgcacga

SEQ ID NO: 508277 - DNA, 30 bp, Artificial Sequence
  Synthetic oligonucleotide
atccatggacgtgcgaatgtagctgcacga

SEQ ID NO: 508278 - DNA, 30 bp, Artificial Sequence
  Synthetic oligonucleotide
atacgattttctattcacttatcatcacga

SEQ ID NO: 508279 - DNA, 30 bp, Artificial Sequence
  Synthetic oligonucleotide
acagctgaaagctgttacactgactcacga

SEQ ID NO: 508280 - DNA, 30 bp, Artificial Sequence
  Synthetic oligonucleotide
ccctccttgtacggttgtaacgcctcacga

SEQ ID NO: 508281 - DNA, 26 bp, Artificial Sequence
  Synthetic oligonucleotide
tccgctgtggaggtactcagtcacga

SEQ ID NO: 508282 - DNA, 30 bp, Artificial Sequence
  Synthetic oligonucleotide
tttaaattgtactcttcactgtggtcacga

SEQ ID NO: 508283 - DNA, 30 bp, Artificial Sequence
  Synthetic oligonucleotide
gtgttgtaagtcccctgtacatacagacga

SEQ ID NO: 508284 - DNA, 30 bp, Artificial Sequence
  Synthetic oligonucleotide
tagtgtcctcttgcagaattcctcagacga

SEQ ID NO: 508285 - DNA, 30 bp, Artificial Sequence
  Synthetic oligonucleotide
aaggccctcagtaggagcgaggagagacga

SEQ ID NO: 508286 - DNA, 30 bp, Artificial Sequence
  Synthetic oligonucleotide
gtgagatgaccctcacccctgcggagacga

SEQ ID NO: 508287 - DNA, 30 bp, Artificial Sequence
  Synthetic oligonucleotide
aattcagaacacagagggtgtttgagacga

SEQ ID NO: 508288 - DNA, 30 bp, Artificial Sequence
  Synthetic oligonucleotide
actaatttacgacacgttaggtatagacga

SEQ ID NO: 508289 - DNA, 29 bp, Artificial Sequence
  Synthetic oligonucleotide
acattcaccctgacacggcgtcccgacga

SEQ ID NO: 508290 - DNA, 30 bp, Artificial Sequence
  Synthetic oligonucleotide
agagcatctgaccgagacgccaacggacga

SEQ ID NO: 508291 - DNA, 30 bp, Artificial Sequence
  Synthetic oligonucleotide
gttgggtgattacatgcttaagcgggacga

SEQ ID NO: 508292 - DNA, 30 bp, Artificial Sequence
  Synthetic oligonucleotide
tcaagcgttagagtgatgatgactggacga

SEQ ID NO: 508293 - DNA, 30 bp, Artificial Sequence
  Synthetic oligonucleotide
gtggattgttgtccgccgcatgttggacga

SEQ ID NO: 508294 - DNA, 30 bp, Artificial Sequence
  Synthetic oligonucleotide
ccacccaacaatataacgatttactgacga

SEQ ID NO: 508295 - DNA, 30 bp, Artificial Sequence
  Synthetic oligonucleotide
aaactgccgccgtgggtatgtctctgacga

SEQ ID NO: 508296 - DNA, 30 bp, Artificial Sequence
  Synthetic oligonucleotide
gcgggatatcgccggctttcgccgtgacga

SEQ ID NO: 508297 - DNA, 30 bp, Artificial Sequence
  Synthetic oligonucleotide
atattgaagccggccccgtttacttgacga

SEQ ID NO: 508298 - DNA, 30 bp, Artificial Sequence
  Synthetic oligonucleotide
cgcagcgcagttttcttgaatagaatacga

SEQ ID NO: 508299 - DNA, 30 bp, Artificial Sequence
  Synthetic oligonucleotide
ctctacgagtaacggtagtttagaatacga

SEQ ID NO: 508300 - DNA, 30 bp, Artificial Sequence
  Synthetic oligonucleotide
atggtcgggtgatgatgtatttgaatacga

SEQ ID NO: 508301 - DNA, 30 bp, Artificial Sequence
  Synthetic oligonucleotide
gcaatttcaagcctgtgtgactcactacga

SEQ ID NO: 508302 - DNA, 30 bp, Artificial Sequence
  Synthetic oligonucleotide
gccgtcgttagaacggatacgttactacga

SEQ ID NO: 508303 - DNA, 30 bp, Artificial Sequence
  Synthetic oligonucleotide
ggtaggtcaaccgcttgcgcgatgctacga

SEQ ID NO: 508304 - DNA, 30 bp, Artificial Sequence
  Synthetic oligonucleotide
cgtgcgagtgtgagtcgttatggagtacga

SEQ ID NO: 508305 - DNA, 30 bp, Artificial Sequence
  Synthetic oligonucleotide
tcttgtaccctcggtacgattgtagtacga

SEQ ID NO: 508306 - DNA, 30 bp, Artificial Sequence
  Synthetic oligonucleotide
tccccctgacgctctgatccgtgcgtacga

SEQ ID NO: 508307 - DNA, 30 bp, Artificial Sequence
  Synthetic oligonucleotide
agagagtgacaatcacggcgagttgtacga

SEQ ID NO: 508308 - DNA, 30 bp, Artificial Sequence
  Synthetic oligonucleotide
aaagtgcggcttccataattaatattacga

SEQ ID NO: 508309 - DNA, 30 bp, Artificial Sequence
  Synthetic oligonucleotide
cccattcttaaactgctccttttattacga

SEQ ID NO: 508310 - DNA, 30 bp, Artificial Sequence
  Synthetic oligonucleotide
tctttccatttaacgcagagatgcttacga

SEQ ID NO: 508311 - DNA, 29 bp, Artificial Sequence
  Synthetic oligonucleotide
gtagaattatctaaacatcgtggttacga

SEQ ID NO: 508312 - DNA, 30 bp, Artificial Sequence
  Synthetic oligonucleotide
ctcactttgagtatgcgctaacatttacga

SEQ ID NO: 508313 - DNA, 30 bp, Artificial Sequence
  Synthetic oligonucleotide
ttcaatgatcgagtctagttcagaaaccga

SEQ ID NO: 508314 - DNA, 30 bp, Artificial Sequence
  Synthetic oligonucleotide
aaagtctatagactggtagcaatcaaccga

SEQ ID NO: 508315 - DNA, 30 bp, Artificial Sequence
  Synthetic oligonucleotide
tttgcccagttgactcgctggtagaaccga

SEQ ID NO: 508316 - DNA, 30 bp, Artificial Sequence
  Synthetic oligonucleotide
ggggaaggcgacccaagaacatcgaaccga

SEQ ID NO: 508317 - DNA, 30 bp, Artificial Sequence
  Synthetic oligonucleotide
atacgggctcgagagttccagcggaaccga

SEQ ID NO: 508318 - DNA, 30 bp, Artificial Sequence
  Synthetic oligonucleotide
tatgaaatgagatagaagcgttctaaccga

SEQ ID NO: 508319 - DNA, 30 bp, Artificial Sequence
  Synthetic oligonucleotide
ggggagaaccagtcggtgatctctcaccga

SEQ ID NO: 508320 - DNA, 30 bp, Artificial Sequence
  Synthetic oligonucleotide
gcatacgcagtgcaggaacggtctcaccga

SEQ ID NO: 508321 - DNA, 30 bp, Artificial Sequence
  Synthetic oligonucleotide
ctctggtgttagccttgattttgggaccga

SEQ ID NO: 508322 - DNA, 30 bp, Artificial Sequence
  Synthetic oligonucleotide
ttacctggaggttacacttttgtctaccga

SEQ ID NO: 508323 - DNA, 30 bp, Artificial Sequence
  Synthetic oligonucleotide
cgatacgacgacgcaatcggcaagtaccga

SEQ ID NO: 508324 - DNA, 30 bp, Artificial Sequence
  Synthetic oligonucleotide
gaatcacgacgccgtttatgtcagtaccga

SEQ ID NO: 508325 - DNA, 30 bp, Artificial Sequence
  Synthetic oligonucleotide
attttgtcggttttgcttgaggattaccga

SEQ ID NO: 508326 - DNA, 30 bp, Artificial Sequence
  Synthetic oligonucleotide
ggaggattctaggtcgttgctaacacccga

SEQ ID NO: 508327 - DNA, 30 bp, Artificial Sequence
  Synthetic oligonucleotide
tgtccaaattccctgacagggagcacccga

SEQ ID NO: 508328 - DNA, 30 bp, Artificial Sequence
  Synthetic oligonucleotide
tatcttcaacctccaacttacgtcacccga

SEQ ID NO: 508329 - DNA, 30 bp, Artificial Sequence
  Synthetic oligonucleotide
gcaacctttaagttatcggctcatacccga

SEQ ID NO: 508330 - DNA, 30 bp, Artificial Sequence
  Synthetic oligonucleotide
tatagggcaccctttagatacgctacccga

SEQ ID NO: 508331 - DNA, 30 bp, Artificial Sequence
  Synthetic oligonucleotide
agtgttctatgaacagttaggtatccccga

SEQ ID NO: 508332 - DNA, 30 bp, Artificial Sequence
  Synthetic oligonucleotide
attgttaaagacaaaccgtcggaagcccga

SEQ ID NO: 508333 - DNA, 30 bp, Artificial Sequence
  Synthetic oligonucleotide
tcctaccggagcccgaaggagatcgcccga

SEQ ID NO: 508334 - DNA, 30 bp, Artificial Sequence
  Synthetic oligonucleotide
gcgtagttgctgtatttgacaattgcccga

SEQ ID NO: 508335 - DNA, 30 bp, Artificial Sequence
  Synthetic oligonucleotide
cttataatgtgcggggacctcttatcccga

SEQ ID NO: 508336 - DNA, 30 bp, Artificial Sequence
  Synthetic oligonucleotide
gttgcctaatgtagtactttagcctcccga

SEQ ID NO: 508337 - DNA, 30 bp, Artificial Sequence
  Synthetic oligonucleotide
catacgaccgtcggcgtattactctcccga

SEQ ID NO: 508338 - DNA, 30 bp, Artificial Sequence
  Synthetic oligonucleotide
tatgcaactggggagtacctccagtcccga

SEQ ID NO: 508339 - DNA, 30 bp, Artificial Sequence
  Synthetic oligonucleotide
ctgaaaagtgcactaacgggaccgtcccga

SEQ ID NO: 508340 - DNA, 30 bp, Artificial Sequence
  Synthetic oligonucleotide
tgcaaaatcggtaagaatatggattcccga

SEQ ID NO: 508341 - DNA, 30 bp, Artificial Sequence
  Synthetic oligonucleotide
tgaggaaaatggatacaatgctgaagccga

SEQ ID NO: 508342 - DNA, 30 bp, Artificial Sequence
  Synthetic oligonucleotide
gggcgagtcaatgaccatgtacctagccga

SEQ ID NO: 508343 - DNA, 30 bp, Artificial Sequence
  Synthetic oligonucleotide
gaagcgctggggtggcatcgggagcgccga

SEQ ID NO: 508344 - DNA, 30 bp, Artificial Sequence
  Synthetic oligonucleotide
tgtttttcagaaaatgctatttggggccga

SEQ ID NO: 508345 - DNA, 30 bp, Artificial Sequence
  Synthetic oligonucleotide
aagctatacaattctcccacctgtggccga

SEQ ID NO: 508346 - DNA, 30 bp, Artificial Sequence
  Synthetic oligonucleotide
tgcaatccttatcggacatttaaaatccga

SEQ ID NO: 508347 - DNA, 30 bp, Artificial Sequence
  Synthetic oligonucleotide
cgcaatctcgtaagatccgtaagaatccga

SEQ ID NO: 508348 - DNA, 30 bp, Artificial Sequence
  Synthetic oligonucleotide
gtttgtctctcatcggctgacatcatccga

SEQ ID NO: 508349 - DNA, 30 bp, Artificial Sequence
  Synthetic oligonucleotide
ccccacggtcgtgtaggcagcaggatccga

SEQ ID NO: 508350 - DNA, 30 bp, Artificial Sequence
  Synthetic oligonucleotide
aattaaactgtttcggtttagctgatccga

SEQ ID NO: 508351 - DNA, 30 bp, Artificial Sequence
  Synthetic oligonucleotide
cctgccccctgacacgcaggctatatccga

SEQ ID NO: 508352 - DNA, 29 bp, Artificial Sequence
  Synthetic oligonucleotide
taacaactaagaacctgcgaccactccga

SEQ ID NO: 508353 - DNA, 30 bp, Artificial Sequence
  Synthetic oligonucleotide
accgtagttgtgcataaccatgtcctccga

SEQ ID NO: 508354 - DNA, 30 bp, Artificial Sequence
  Synthetic oligonucleotide
accagctaccatgactctggttagctccga

SEQ ID NO: 508355 - DNA, 30 bp, Artificial Sequence
  Synthetic oligonucleotide
ctgccgcagatgcgtgtacgaacgctccga

SEQ ID NO: 508356 - DNA, 30 bp, Artificial Sequence
  Synthetic oligonucleotide
ttttgaatagagtgtcactctctgctccga

SEQ ID NO: 508357 - DNA, 30 bp, Artificial Sequence
  Synthetic oligonucleotide
ggttccacgtatgcagtgattcgtgtccga

SEQ ID NO: 508358 - DNA, 30 bp, Artificial Sequence
  Synthetic oligonucleotide
taatttagcgcttgcttgaggtggttccga

SEQ ID NO: 508359 - DNA, 30 bp, Artificial Sequence
  Synthetic oligonucleotide
gcagcctagcgcatatttgcgctaaagcga

SEQ ID NO: 508360 - DNA, 30 bp, Artificial Sequence
  Synthetic oligonucleotide
gtgaggcatgtccgcccgctcacgaagcga

SEQ ID NO: 508361 - DNA, 30 bp, Artificial Sequence
  Synthetic oligonucleotide
attctggataggcctcagctgaggaagcga

SEQ ID NO: 508362 - DNA, 30 bp, Artificial Sequence
  Synthetic oligonucleotide
tccttcgacatcgctttggagactaagcga

SEQ ID NO: 508363 - DNA, 30 bp, Artificial Sequence
  Synthetic oligonucleotide
ctctctggtttggcatgcgttgaccagcga

SEQ ID NO: 508364 - DNA, 30 bp, Artificial Sequence
  Synthetic oligonucleotide
caggatgttaggggctagtcgggagagcga

SEQ ID NO: 508365 - DNA, 30 bp, Artificial Sequence
  Synthetic oligonucleotide
tgtgggcccggttagccttcaaacgagcga

SEQ ID NO: 508366 - DNA, 30 bp, Artificial Sequence
  Synthetic oligonucleotide
gggttgaacacctttgcgtatttcgagcga

SEQ ID NO: 508367 - DNA, 30 bp, Artificial Sequence
  Synthetic oligonucleotide
taggaatagccaaggcattttagggagcga

SEQ ID NO: 508368 - DNA, 30 bp, Artificial Sequence
  Synthetic oligonucleotide
cggatacaacaggatccggggtgggagcga

SEQ ID NO: 508369 - DNA, 30 bp, Artificial Sequence
  Synthetic oligonucleotide
ggagagttcttgaattagtcactggagcga

SEQ ID NO: 508370 - DNA, 31 bp, Artificial Sequence
  Synthetic oligonucleotide
atagcgaacaactcctactgcgagaacgcga

SEQ ID NO: 508371 - DNA, 30 bp, Artificial Sequence
  Synthetic oligonucleotide
ctgggttgtacttatatgcatggaacgcga

SEQ ID NO: 508372 - DNA, 30 bp, Artificial Sequence
  Synthetic oligonucleotide
caccgcagcgcgtgtagtaaggtaacgcga

SEQ ID NO: 508373 - DNA, 27 bp, Artificial Sequence
  Synthetic oligonucleotide
tggtttcgcagcccaaaagccacgcga

SEQ ID NO: 508374 - DNA, 30 bp, Artificial Sequence
  Synthetic oligonucleotide
gaataaacagagtctcgccataagacgcga

SEQ ID NO: 508375 - DNA, 30 bp, Artificial Sequence
  Synthetic oligonucleotide
gtctatagcttccttgggaaacagacgcga

SEQ ID NO: 508376 - DNA, 30 bp, Artificial Sequence
  Synthetic oligonucleotide
gtcgaactgttccctcgatgtgagacgcga

SEQ ID NO: 508377 - DNA, 30 bp, Artificial Sequence
  Synthetic oligonucleotide
tgatctactcaccgtatgtcatagacgcga

SEQ ID NO: 508378 - DNA, 30 bp, Artificial Sequence
  Synthetic oligonucleotide
aagaatctaggttaaatttgaaggacgcga

SEQ ID NO: 508379 - DNA, 30 bp, Artificial Sequence
  Synthetic oligonucleotide
agactgtacaatcgggtttattggacgcga

SEQ ID NO: 508380 - DNA, 30 bp, Artificial Sequence
  Synthetic oligonucleotide
tcgtgtgagagaaatttagtcttgacgcga

SEQ ID NO: 508381 - DNA, 30 bp, Artificial Sequence
  Synthetic oligonucleotide
tacttaacgcccagcgatggctatacgcga

SEQ ID NO: 508382 - DNA, 30 bp, Artificial Sequence
  Synthetic oligonucleotide
ccttcggtcgtttatgttggtattacgcga

SEQ ID NO: 508383 - DNA, 27 bp, Artificial Sequence
  Synthetic oligonucleotide
agataggttgttgtggatcttacgcga

SEQ ID NO: 508384 - DNA, 30 bp, Artificial Sequence
  Synthetic oligonucleotide
ggccctttctataattcacatccaccgcga

SEQ ID NO: 508385 - DNA, 30 bp, Artificial Sequence
  Synthetic oligonucleotide
cttaaggtgtagttactgatggtaccgcga

SEQ ID NO: 508386 - DNA, 30 bp, Artificial Sequence
  Synthetic oligonucleotide
aacccatggtgttattattaattaccgcga

SEQ ID NO: 508387 - DNA, 30 bp, Artificial Sequence
  Synthetic oligonucleotide
tacatatacgcaggggaccgacacccgcga

SEQ ID NO: 508388 - DNA, 30 bp, Artificial Sequence
  Synthetic oligonucleotide
ttgtaccacgactggtcgtctcccccgcga

SEQ ID NO: 508389 - DNA, 30 bp, Artificial Sequence
  Synthetic oligonucleotide
ctgcgtttcgctggagatgataagccgcga

SEQ ID NO: 508390 - DNA, 30 bp, Artificial Sequence
  Synthetic oligonucleotide
ttttgagcgctcgatcgctcatatccgcga

SEQ ID NO: 508391 - DNA, 30 bp, Artificial Sequence
  Synthetic oligonucleotide
ctaagtatttatcgtgatggccaagcgcga

SEQ ID NO: 508392 - DNA, 30 bp, Artificial Sequence
  Synthetic oligonucleotide
acaaaagccggtcaacacataagagcgcga

SEQ ID NO: 508393 - DNA, 30 bp, Artificial Sequence
  Synthetic oligonucleotide
tcttttggtcgggtcaggctcctagcgcga

SEQ ID NO: 508394 - DNA, 30 bp, Artificial Sequence
  Synthetic oligonucleotide
atccattgctcattgaggcgtctatcgcga

SEQ ID NO: 508395 - DNA, 30 bp, Artificial Sequence
  Synthetic oligonucleotide
ggttctctggccacatcttgtgtctcgcga

SEQ ID NO: 508396 - DNA, 30 bp, Artificial Sequence
  Synthetic oligonucleotide
gtatacgccaccaccctgtaagggtcgcga

SEQ ID NO: 508397 - DNA, 30 bp, Artificial Sequence
  Synthetic oligonucleotide
gcactatgagttttgttactcggaaggcga

SEQ ID NO: 508398 - DNA, 30 bp, Artificial Sequence
  Synthetic oligonucleotide
agtccccggcaaaagtccaaggggaggcga

SEQ ID NO: 508399 - DNA, 30 bp, Artificial Sequence
  Synthetic oligonucleotide
gttaatactatacctttatatagtaggcga

SEQ ID NO: 508400 - DNA, 30 bp, Artificial Sequence
  Synthetic oligonucleotide
caataagtattgcagtaggcattacggcga

SEQ ID NO: 508401 - DNA, 30 bp, Artificial Sequence
  Synthetic oligonucleotide
cgcaatagcgcatcggatctagcccggcga

SEQ ID NO: 508402 - DNA, 30 bp, Artificial Sequence
  Synthetic oligonucleotide
ttttcctctggtggttccctcgcccggcga

SEQ ID NO: 508403 - DNA, 30 bp, Artificial Sequence
  Synthetic oligonucleotide
gggccctctccagataagcacgagcggcga

SEQ ID NO: 508404 - DNA, 30 bp, Artificial Sequence
  Synthetic oligonucleotide
tggatccgcccggtatctaaagaagggcga

SEQ ID NO: 508405 - DNA, 30 bp, Artificial Sequence
  Synthetic oligonucleotide
cacgatatcccaaggatacccgcgtggcga

SEQ ID NO: 508406 - DNA, 30 bp, Artificial Sequence
  Synthetic oligonucleotide
tgagtaattagaccatttcatacttggcga

SEQ ID NO: 508407 - DNA, 30 bp, Artificial Sequence
  Synthetic oligonucleotide
tttgtctcgagtagttcgttatcaatgcga

SEQ ID NO: 508408 - DNA, 30 bp, Artificial Sequence
  Synthetic oligonucleotide
actgaccacttgacagaagcacgcatgcga

SEQ ID NO: 508409 - DNA, 30 bp, Artificial Sequence
  Synthetic oligonucleotide
gcgataacggatacccataccggcatgcga

SEQ ID NO: 508410 - DNA, 30 bp, Artificial Sequence
  Synthetic oligonucleotide
ggattatatattctcctggtgcagatgcga

SEQ ID NO: 508411 - DNA, 30 bp, Artificial Sequence
  Synthetic oligonucleotide
cgggcagcttcgcggatgcaacctatgcga

SEQ ID NO: 508412 - DNA, 30 bp, Artificial Sequence
  Synthetic oligonucleotide
ttggcattaagttccaaaaacattatgcga

SEQ ID NO: 508413 - DNA, 30 bp, Artificial Sequence
  Synthetic oligonucleotide
taatttgtaaacggtcatttgagactgcga

SEQ ID NO: 508414 - DNA, 30 bp, Artificial Sequence
  Synthetic oligonucleotide
gagtgaatttcagtaaatattcagctgcga

SEQ ID NO: 508415 - DNA, 30 bp, Artificial Sequence
  Synthetic oligonucleotide
acttatcaactttaagtcatgttgctgcga

SEQ ID NO: 508416 - DNA, 30 bp, Artificial Sequence
  Synthetic oligonucleotide
gtggtaacggggggagcgaaaaaagtgcga

SEQ ID NO: 508417 - DNA, 30 bp, Artificial Sequence
  Synthetic oligonucleotide
gtatcgcacattgtgtgatttgaagtgcga

SEQ ID NO: 508418 - DNA, 30 bp, Artificial Sequence
  Synthetic oligonucleotide
aggtgtagctacgcccagctgtaagtgcga

SEQ ID NO: 508419 - DNA, 30 bp, Artificial Sequence
  Synthetic oligonucleotide
taggacagcggccttagaaccggagtgcga

SEQ ID NO: 508420 - DNA, 30 bp, Artificial Sequence
  Synthetic oligonucleotide
ttatctacagcacgcagcgaatgagtgcga

SEQ ID NO: 508421 - DNA, 30 bp, Artificial Sequence
  Synthetic oligonucleotide
aagtaggtttgtcggtggcaccctgtgcga

SEQ ID NO: 508422 - DNA, 30 bp, Artificial Sequence
  Synthetic oligonucleotide
cgcaaaacgcaccttccaatacgtgtgcga

SEQ ID NO: 508423 - DNA, 30 bp, Artificial Sequence
  Synthetic oligonucleotide
actgtttgcggctctgtggtagcattgcga

SEQ ID NO: 508424 - DNA, 30 bp, Artificial Sequence
  Synthetic oligonucleotide
gtgttcttggcttgcaactacagattgcga

SEQ ID NO: 508425 - DNA, 30 bp, Artificial Sequence
  Synthetic oligonucleotide
acatcgaatggggaaggttcgcacttgcga

SEQ ID NO: 508426 - DNA, 30 bp, Artificial Sequence
  Synthetic oligonucleotide
ccatcatttattgatcgcggcgcgttgcga

SEQ ID NO: 508427 - DNA, 30 bp, Artificial Sequence
  Synthetic oligonucleotide
ctctctgtgccatcgcaacacactttgcga

SEQ ID NO: 508428 - DNA, 30 bp, Artificial Sequence
  Synthetic oligonucleotide
gttttccagagagaccggaaagcaaatcga

SEQ ID NO: 508429 - DNA, 30 bp, Artificial Sequence
  Synthetic oligonucleotide
tgtgattcatgacggagccgtttcaatcga

SEQ ID NO: 508430 - DNA, 30 bp, Artificial Sequence
  Synthetic oligonucleotide
gaccacttcgcgttcgtcgtaatgaatcga

SEQ ID NO: 508431 - DNA, 30 bp, Artificial Sequence
  Synthetic oligonucleotide
tacttggcgccttaataacgcggtaatcga

SEQ ID NO: 508432 - DNA, 30 bp, Artificial Sequence
  Synthetic oligonucleotide
ttgttgtattcttacaatgcagttaatcga

SEQ ID NO: 508433 - DNA, 30 bp, Artificial Sequence
  Synthetic oligonucleotide
tcgtcatcaatggacgcagagcgacatcga

SEQ ID NO: 508434 - DNA, 30 bp, Artificial Sequence
  Synthetic oligonucleotide
cacagcttccgccagtgctcactacatcga

SEQ ID NO: 508435 - DNA, 30 bp, Artificial Sequence
  Synthetic oligonucleotide
tttttatgccgcaacctaaggtcccatcga

SEQ ID NO: 508436 - DNA, 30 bp, Artificial Sequence
  Synthetic oligonucleotide
tgtgacactaccctcttgtgcccgcatcga

SEQ ID NO: 508437 - DNA, 30 bp, Artificial Sequence
  Synthetic oligonucleotide
tatactactgctactcgctgtacagatcga

SEQ ID NO: 508438 - DNA, 30 bp, Artificial Sequence
  Synthetic oligonucleotide
cattcccactatcgatgcaagtcagatcga

SEQ ID NO: 508439 - DNA, 30 bp, Artificial Sequence
  Synthetic oligonucleotide
atgaccaagacgtttaaacgttcagatcga

SEQ ID NO: 508440 - DNA, 30 bp, Artificial Sequence
  Synthetic oligonucleotide
caaattatatttgttgaactgtacgatcga

SEQ ID NO: 508441 - DNA, 30 bp, Artificial Sequence
  Synthetic oligonucleotide
agaatcagtattagtctgtagagcgatcga

SEQ ID NO: 508442 - DNA, 30 bp, Artificial Sequence
  Synthetic oligonucleotide
cgtctggctacccatatgtgctgcgatcga

SEQ ID NO: 508443 - DNA, 26 bp, Artificial Sequence
  Synthetic oligonucleotide
gttaataagtaattgtccctgatcga

SEQ ID NO: 508444 - DNA, 30 bp, Artificial Sequence
  Synthetic oligonucleotide
acactcggttcggagtttctgagatatcga

SEQ ID NO: 508445 - DNA, 30 bp, Artificial Sequence
  Synthetic oligonucleotide
ctttaacccattttagaaatcgtctatcga

SEQ ID NO: 508446 - DNA, 30 bp, Artificial Sequence
  Synthetic oligonucleotide
ccatcagtatgacaacgggttggttatcga

SEQ ID NO: 508447 - DNA, 31 bp, Artificial Sequence
  Synthetic oligonucleotide
ggaatcttagagtaaatgtccaggcactcga

SEQ ID NO: 508448 - DNA, 30 bp, Artificial Sequence
  Synthetic oligonucleotide
tgttagcaccagtccacaggtgtcactcga

SEQ ID NO: 508449 - DNA, 30 bp, Artificial Sequence
  Synthetic oligonucleotide
gtcaaacgactttgtcgcaagcggactcga

SEQ ID NO: 508450 - DNA, 30 bp, Artificial Sequence
  Synthetic oligonucleotide
ccggttatattatgcgtggtcatgactcga

SEQ ID NO: 508451 - DNA, 30 bp, Artificial Sequence
  Synthetic oligonucleotide
tcttaggaattgggtttacggatgactcga

SEQ ID NO: 508452 - DNA, 30 bp, Artificial Sequence
  Synthetic oligonucleotide
gaaatgagggtcgttagtataaaccctcga

SEQ ID NO: 508453 - DNA, 30 bp, Artificial Sequence
  Synthetic oligonucleotide
gtttgcgcggcgtcgttggttagccctcga

SEQ ID NO: 508454 - DNA, 27 bp, Artificial Sequence
  Synthetic oligonucleotide
ttccgtggggcctgatgacagcctcga

SEQ ID NO: 508455 - DNA, 30 bp, Artificial Sequence
  Synthetic oligonucleotide
aatttgggtaacacccttttcattcctcga

SEQ ID NO: 508456 - DNA, 30 bp, Artificial Sequence
  Synthetic oligonucleotide
tacttcttcggcatgctgcgtcttcctcga

SEQ ID NO: 508457 - DNA, 30 bp, Artificial Sequence
  Synthetic oligonucleotide
tgcccattaacgtttaactctcgagctcga

SEQ ID NO: 508458 - DNA, 30 bp, Artificial Sequence
  Synthetic oligonucleotide
ataccgatatagcatctataacttgctcga

SEQ ID NO: 508459 - DNA, 30 bp, Artificial Sequence
  Synthetic oligonucleotide
tgctcttaagcccctgctagccgatctcga

SEQ ID NO: 508460 - DNA, 30 bp, Artificial Sequence
  Synthetic oligonucleotide
ttccgcgtcttgtggggaggcgcgtctcga

SEQ ID NO: 508461 - DNA, 30 bp, Artificial Sequence
  Synthetic oligonucleotide
ggactgtatttctttcccggtgggtctcga

SEQ ID NO: 508462 - DNA, 30 bp, Artificial Sequence
  Synthetic oligonucleotide
gaaacaacagtatagatgggtctttctcga

SEQ ID NO: 508463 - DNA, 30 bp, Artificial Sequence
  Synthetic oligonucleotide
aatcatgtgacattcagcatccaaagtcga

SEQ ID NO: 508464 - DNA, 29 bp, Artificial Sequence
  Synthetic oligonucleotide
gggcggttcgtaggggacttttaagtcga

SEQ ID NO: 508465 - DNA, 30 bp, Artificial Sequence
  Synthetic oligonucleotide
tttttagtattttatatctcccagagtcga

SEQ ID NO: 508466 - DNA, 30 bp, Artificial Sequence
  Synthetic oligonucleotide
ctgccgctctatatgcgagtagtacgtcga

SEQ ID NO: 508467 - DNA, 30 bp, Artificial Sequence
  Synthetic oligonucleotide
actggcacggtgaacaacatcgctcgtcga

SEQ ID NO: 508468 - DNA, 30 bp, Artificial Sequence
  Synthetic oligonucleotide
tcattaccgactcccaaggcgggtcgtcga

SEQ ID NO: 508469 - DNA, 30 bp, Artificial Sequence
  Synthetic oligonucleotide
gcatcgtatccacttagcgtcgttcgtcga

SEQ ID NO: 508470 - DNA, 30 bp, Artificial Sequence
  Synthetic oligonucleotide
atttcggcctaggagacgcggacctgtcga

SEQ ID NO: 508471 - DNA, 30 bp, Artificial Sequence
  Synthetic oligonucleotide
agtcgcagagccagaaaacacttctgtcga

SEQ ID NO: 508472 - DNA, 30 bp, Artificial Sequence
  Synthetic oligonucleotide
ttagagtggaacttctgtttacgttgtcga

SEQ ID NO: 508473 - DNA, 30 bp, Artificial Sequence
  Synthetic oligonucleotide
ctattacagtttggtaggggcggcattcga

SEQ ID NO: 508474 - DNA, 30 bp, Artificial Sequence
  Synthetic oligonucleotide
ggacctggcatcgacgtagtaaagattcga

SEQ ID NO: 508475 - DNA, 30 bp, Artificial Sequence
  Synthetic oligonucleotide
aacacggctacaaccgattcctatattcga

SEQ ID NO: 508476 - DNA, 30 bp, Artificial Sequence
  Synthetic oligonucleotide
acactctaaccttaaagtccaacgcttcga

SEQ ID NO: 508477 - DNA, 30 bp, Artificial Sequence
  Synthetic oligonucleotide
ttaagaatttggatctgggttgtagttcga

SEQ ID NO: 508478 - DNA, 30 bp, Artificial Sequence
  Synthetic oligonucleotide
gtttctgcaagcatcctattattcgttcga

SEQ ID NO: 508479 - DNA, 30 bp, Artificial Sequence
  Synthetic oligonucleotide
gtggagtgtgctttctgctggtcggttcga

SEQ ID NO: 508480 - DNA, 30 bp, Artificial Sequence
  Synthetic oligonucleotide
aacctccagcacgcagagtagagggttcga

SEQ ID NO: 508481 - DNA, 30 bp, Artificial Sequence
  Synthetic oligonucleotide
tcctctgccgatctgggcatcccatttcga

SEQ ID NO: 508482 - DNA, 30 bp, Artificial Sequence
  Synthetic oligonucleotide
aaggtctgatagcagatagccctatttcga

SEQ ID NO: 508483 - DNA, 30 bp, Artificial Sequence
  Synthetic oligonucleotide
aggggggtctagaaagagggattctttcga

SEQ ID NO: 508484 - DNA, 31 bp, Artificial Sequence
  Synthetic oligonucleotide
aatagcacgcgatgccatctgtctgtttcga

SEQ ID NO: 508485 - DNA, 30 bp, Artificial Sequence
  Synthetic oligonucleotide
cccaaccccgataggggccttagaaaagga

SEQ ID NO: 508486 - DNA, 30 bp, Artificial Sequence
  Synthetic oligonucleotide
tatttataactgcaggctttactaaaagga

SEQ ID NO: 508487 - DNA, 30 bp, Artificial Sequence
  Synthetic oligonucleotide
gcatcctacaacacatgcgtgtacaaagga

SEQ ID NO: 508488 - DNA, 30 bp, Artificial Sequence
  Synthetic oligonucleotide
aaatccacactagtaaacgtatgcaaagga

SEQ ID NO: 508489 - DNA, 30 bp, Artificial Sequence
  Synthetic oligonucleotide
tctcagcatgcacataagtgcatgaaagga

SEQ ID NO: 508490 - DNA, 30 bp, Artificial Sequence
  Synthetic oligonucleotide
gtatccatccgggaacggaagtgtaaagga

SEQ ID NO: 508491 - DNA, 30 bp, Artificial Sequence
  Synthetic oligonucleotide
ctgtagtccgctttttcgccgccccaagga

SEQ ID NO: 508492 - DNA, 31 bp, Artificial Sequence
  Synthetic oligonucleotide
actatctcgacggccgttatgagtgcaagga

SEQ ID NO: 508493 - DNA, 30 bp, Artificial Sequence
  Synthetic oligonucleotide
ggtcctagcaacatttatccgttgcaagga

SEQ ID NO: 508494 - DNA, 30 bp, Artificial Sequence
  Synthetic oligonucleotide
gtccaaatgcagtttcttcacagagaagga

SEQ ID NO: 508495 - DNA, 30 bp, Artificial Sequence
  Synthetic oligonucleotide
agagtgttaggaaattttgtccgagaagga

SEQ ID NO: 508496 - DNA, 30 bp, Artificial Sequence
  Synthetic oligonucleotide
tgtcttcttaaagcacggagcttcgaagga

SEQ ID NO: 508497 - DNA, 30 bp, Artificial Sequence
  Synthetic oligonucleotide
tatttaacggaagtgttagcagcggaagga

SEQ ID NO: 508498 - DNA, 30 bp, Artificial Sequence
  Synthetic oligonucleotide
tccagaaaaacgaagtggtttgtggaagga

SEQ ID NO: 508499 - DNA, 31 bp, Artificial Sequence
  Synthetic oligonucleotide
ggtaggtatgccgtgggttgaccgataagga

SEQ ID NO: 508500 - DNA, 30 bp, Artificial Sequence
  Synthetic oligonucleotide
ttcataccgggtctgtatcccccgtaagga

SEQ ID NO: 508501 - DNA, 30 bp, Artificial Sequence
  Synthetic oligonucleotide
ctacccagccacgtagcaaccaggtaagga

SEQ ID NO: 508502 - DNA, 30 bp, Artificial Sequence
  Synthetic oligonucleotide
catcatgtccgacgccttcagatttaagga

SEQ ID NO: 508503 - DNA, 30 bp, Artificial Sequence
  Synthetic oligonucleotide
taatatctaattcgagaaccggtttaagga

SEQ ID NO: 508504 - DNA, 30 bp, Artificial Sequence
  Synthetic oligonucleotide
aagctcttctggacctcccattgcacagga

SEQ ID NO: 508505 - DNA, 30 bp, Artificial Sequence
  Synthetic oligonucleotide
gattcagatgtaatgctggttgcgacagga

SEQ ID NO: 508506 - DNA, 30 bp, Artificial Sequence
  Synthetic oligonucleotide
gaatgtattagattgggggtccggacagga

SEQ ID NO: 508507 - DNA, 30 bp, Artificial Sequence
  Synthetic oligonucleotide
cagtagaaaaaaaagggaatgtggacagga

SEQ ID NO: 508508 - DNA, 30 bp, Artificial Sequence
  Synthetic oligonucleotide
gtattgaatctgacaacgagaatgacagga

SEQ ID NO: 508509 - DNA, 30 bp, Artificial Sequence
  Synthetic oligonucleotide
gagtttaacggctcgatcctcatgacagga

SEQ ID NO: 508510 - DNA, 30 bp, Artificial Sequence
  Synthetic oligonucleotide
atttaaatccaaattgccactagtacagga

SEQ ID NO: 508511 - DNA, 30 bp, Artificial Sequence
  Synthetic oligonucleotide
ttctggaggctactttttcttagtacagga

SEQ ID NO: 508512 - DNA, 30 bp, Artificial Sequence
  Synthetic oligonucleotide
atggactggattggcggcgctcaaccagga

SEQ ID NO: 508513 - DNA, 30 bp, Artificial Sequence
  Synthetic oligonucleotide
gttttataccatgacagcagctcaccagga

SEQ ID NO: 508514 - DNA, 30 bp, Artificial Sequence
  Synthetic oligonucleotide
tattctgacaaaacgtaggcgtgcccagga

SEQ ID NO: 508515 - DNA, 30 bp, Artificial Sequence
  Synthetic oligonucleotide
tgtgacgtttaagacgggtttccgccagga

SEQ ID NO: 508516 - DNA, 30 bp, Artificial Sequence
  Synthetic oligonucleotide
agcgtatcactgatatgggaacttccagga

SEQ ID NO: 508517 - DNA, 30 bp, Artificial Sequence
  Synthetic oligonucleotide
gcgtccggtggaagcgctaagcttccagga

SEQ ID NO: 508518 - DNA, 30 bp, Artificial Sequence
  Synthetic oligonucleotide
ttcagcattaggcgatcgggatttccagga

SEQ ID NO: 508519 - DNA, 30 bp, Artificial Sequence
  Synthetic oligonucleotide
aaaaaagcacggccgtaggacggagcagga

SEQ ID NO: 508520 - DNA, 30 bp, Artificial Sequence
  Synthetic oligonucleotide
caattttatcgcgctatggtctgagcagga

SEQ ID NO: 508521 - DNA, 30 bp, Artificial Sequence
  Synthetic oligonucleotide
gtatgccttttgatgaagtcatacgcagga

SEQ ID NO: 508522 - DNA, 30 bp, Artificial Sequence
  Synthetic oligonucleotide
cgcatgagcggagtataatagtacgcagga

SEQ ID NO: 508523 - DNA, 30 bp, Artificial Sequence
  Synthetic oligonucleotide
ttaaagagttaatttcagcacgtcgcagga

SEQ ID NO: 508524 - DNA, 30 bp, Artificial Sequence
  Synthetic oligonucleotide
attttctcaaggtgcaactgacgtgcagga

SEQ ID NO: 508525 - DNA, 30 bp, Artificial Sequence
  Synthetic oligonucleotide
ggattaacgactaacagagttgttgcagga

SEQ ID NO: 508526 - DNA, 30 bp, Artificial Sequence
  Synthetic oligonucleotide
aactgacatgaggcctgagagctatcagga

SEQ ID NO: 508527 - DNA, 30 bp, Artificial Sequence
  Synthetic oligonucleotide
cgggcaacaagttcaaatctcgactcagga

SEQ ID NO: 508528 - DNA, 30 bp, Artificial Sequence
  Synthetic oligonucleotide
cccagtccgcgactcgcgaaatactcagga

SEQ ID NO: 508529 - DNA, 30 bp, Artificial Sequence
  Synthetic oligonucleotide
tttcgtccgcgcttcgttggtgtgtcagga

SEQ ID NO: 508530 - DNA, 30 bp, Artificial Sequence
  Synthetic oligonucleotide
aggatggtatccggtagtgctatttcagga

SEQ ID NO: 508531 - DNA, 30 bp, Artificial Sequence
  Synthetic oligonucleotide
gcggggagtaaacatctgacatgaagagga

SEQ ID NO: 508532 - DNA, 30 bp, Artificial Sequence
  Synthetic oligonucleotide
acagtgtcaaggactcctagtcagagagga

SEQ ID NO: 508533 - DNA, 30 bp, Artificial Sequence
  Synthetic oligonucleotide
gcttcctcctcctactcagcaaggagagga

SEQ ID NO: 508534 - DNA, 30 bp, Artificial Sequence
  Synthetic oligonucleotide
cgttggcgtaagcatacatgaaggagagga

SEQ ID NO: 508535 - DNA, 30 bp, Artificial Sequence
  Synthetic oligonucleotide
gagctcttgtaccaaatcggtgggagagga

SEQ ID NO: 508536 - DNA, 30 bp, Artificial Sequence
  Synthetic oligonucleotide
ctatgtgtccagggctcgatagatagagga

SEQ ID NO: 508537 - DNA, 30 bp, Artificial Sequence
  Synthetic oligonucleotide
ggatgacctcttaatcgggataaacgagga

SEQ ID NO: 508538 - DNA, 30 bp, Artificial Sequence
  Synthetic oligonucleotide
tccacggttatcttataagagagacgagga

SEQ ID NO: 508539 - DNA, 30 bp, Artificial Sequence
  Synthetic oligonucleotide
gacgaagcacacgcccggggtgtacgagga

SEQ ID NO: 508540 - DNA, 30 bp, Artificial Sequence
  Synthetic oligonucleotide
gagtggaaaagctttcctatataccgagga

SEQ ID NO: 508541 - DNA, 30 bp, Artificial Sequence
  Synthetic oligonucleotide
agcaccagacagtgtattatggggcgagga

SEQ ID NO: 508542 - DNA, 30 bp, Artificial Sequence
  Synthetic oligonucleotide
taggcaagacctcgcgaattatggcgagga

SEQ ID NO: 508543 - DNA, 30 bp, Artificial Sequence
  Synthetic oligonucleotide
ttgccatacgggttaatgtgtttgcgagga

SEQ ID NO: 508544 - DNA, 30 bp, Artificial Sequence
  Synthetic oligonucleotide
acagacgacaaggagaaagacgttcgagga

SEQ ID NO: 508545 - DNA, 30 bp, Artificial Sequence
  Synthetic oligonucleotide
gagtgccaatcccaacgccggcgaggagga

SEQ ID NO: 508546 - DNA, 30 bp, Artificial Sequence
  Synthetic oligonucleotide
ttgatttaatgacagcgcctagacggagga

SEQ ID NO: 508547 - DNA, 30 bp, Artificial Sequence
  Synthetic oligonucleotide
tgtgagtacttcaccattttttccggagga

SEQ ID NO: 508548 - DNA, 30 bp, Artificial Sequence
  Synthetic oligonucleotide
atttccgaacctaattgttatttcggagga

SEQ ID NO: 508549 - DNA, 30 bp, Artificial Sequence
  Synthetic oligonucleotide
ccgcatcctagcaagcgattcgcgggagga

SEQ ID NO: 508550 - DNA, 40 bp, Artificial Sequence
  Synthetic oligonucleotide
aagataatacattcatggtatggtaggggatcggggagga

SEQ ID NO: 508551 - DNA, 40 bp, Artificial Sequence
  Synthetic oligonucleotide
aagataatacattcatgggatggtcggggatcggggagga

SEQ ID NO: 508552 - DNA, 39 bp, Artificial Sequence
  Synthetic oligonucleotide
aagataatcattcatggtatggtcggggatcggggagga

SEQ ID NO: 508553 - DNA, 40 bp, Artificial Sequence
  Synthetic oligonucleotide
aagataatacattcatggtatgttcggggatcggggagga

SEQ ID NO: 508554 - DNA, 30 bp, Artificial Sequence
  Synthetic oligonucleotide
gcttgccttcaaaggcatagaatgggagga

SEQ ID NO: 508555 - DNA, 30 bp, Artificial Sequence
  Synthetic oligonucleotide
gatacaccgtttcagtcccgcactggagga

SEQ ID NO: 508556 - DNA, 30 bp, Artificial Sequence
  Synthetic oligonucleotide
gcacaacacacttgtagggagactggagga

SEQ ID NO: 508557 - DNA, 40 bp, Artificial Sequence
  Synthetic oligonucleotide
aagataatacattcatggtatggtcggggatcgtggagga

SEQ ID NO: 508558 - DNA, 30 bp, Artificial Sequence
  Synthetic oligonucleotide
taacatcccgggttcgtttgtacatgagga

SEQ ID NO: 508559 - DNA, 30 bp, Artificial Sequence
  Synthetic oligonucleotide
tcgaggacataagttggatcacgatgagga

SEQ ID NO: 508560 - DNA, 30 bp, Artificial Sequence
  Synthetic oligonucleotide
gttggaattcggcggttggagatgtgagga

SEQ ID NO: 508561 - DNA, 30 bp, Artificial Sequence
  Synthetic oligonucleotide
gtggagatgcaactcctgcctttgtgagga

SEQ ID NO: 508562 - DNA, 30 bp, Artificial Sequence
  Synthetic oligonucleotide
caagcagaccgcctttcggtatcttgagga

SEQ ID NO: 508563 - DNA, 30 bp, Artificial Sequence
  Synthetic oligonucleotide
agggaccgggaacaggttagcggttgagga

SEQ ID NO: 508564 - DNA, 31 bp, Artificial Sequence
  Synthetic oligonucleotide
agcctatactatttagcggcttttttgagga

SEQ ID NO: 508565 - DNA, 30 bp, Artificial Sequence
  Synthetic oligonucleotide
gggcctcactcagcgcttaaaggaatagga

SEQ ID NO: 508566 - DNA, 30 bp, Artificial Sequence
  Synthetic oligonucleotide
gggactcgtcacatgcattgtttaatagga

SEQ ID NO: 508567 - DNA, 30 bp, Artificial Sequence
  Synthetic oligonucleotide
acaagatgttatgggtgcagcgtcatagga

SEQ ID NO: 508568 - DNA, 30 bp, Artificial Sequence
  Synthetic oligonucleotide
gactcggcactgtgaagacggatgatagga

SEQ ID NO: 508569 - DNA, 30 bp, Artificial Sequence
  Synthetic oligonucleotide
aaacgataacgggtgaacaaaggtatagga

SEQ ID NO: 508570 - DNA, 30 bp, Artificial Sequence
  Synthetic oligonucleotide
aaatattgagcccatgccggtgcactagga

SEQ ID NO: 508571 - DNA, 30 bp, Artificial Sequence
  Synthetic oligonucleotide
gttccgataactacgttatcgtgcctagga

SEQ ID NO: 508572 - DNA, 30 bp, Artificial Sequence
  Synthetic oligonucleotide
ggtttcatggagaattttgctcagctagga

SEQ ID NO: 508573 - DNA, 30 bp, Artificial Sequence
  Synthetic oligonucleotide
tactgcatactacggggtaaagagctagga

SEQ ID NO: 508574 - DNA, 30 bp, Artificial Sequence
  Synthetic oligonucleotide
tatctgaggcagctgaatcaatccgtagga

SEQ ID NO: 508575 - DNA, 30 bp, Artificial Sequence
  Synthetic oligonucleotide
ggtaacataacattagggaagtatgtagga

SEQ ID NO: 508576 - DNA, 30 bp, Artificial Sequence
  Synthetic oligonucleotide
gtcgaggtaaactattacgaggctgtagga

SEQ ID NO: 508577 - DNA, 30 bp, Artificial Sequence
  Synthetic oligonucleotide
tcccctttactacccccctggatattagga

SEQ ID NO: 508578 - DNA, 30 bp, Artificial Sequence
  Synthetic oligonucleotide
gttcgttcctctgacggatgcgtattagga

SEQ ID NO: 508579 - DNA, 30 bp, Artificial Sequence
  Synthetic oligonucleotide
aaggggattgagggagtcatgacgttagga

SEQ ID NO: 508580 - DNA, 30 bp, Artificial Sequence
  Synthetic oligonucleotide
aattttatacaagaccctaagccgttagga

SEQ ID NO: 508581 - DNA, 30 bp, Artificial Sequence
  Synthetic oligonucleotide
gaaaaatttattgaaaatctggatttagga

SEQ ID NO: 508582 - DNA, 30 bp, Artificial Sequence
  Synthetic oligonucleotide
cttcccaatcattcagaggctcttttagga

SEQ ID NO: 508583 - DNA, 31 bp, Artificial Sequence
  Synthetic oligonucleotide
gcgcccccggggggggggaagataaaacgga

SEQ ID NO: 508584 - DNA, 30 bp, Artificial Sequence
  Synthetic oligonucleotide
attctgcgagtcacattcgtctgaaacgga

SEQ ID NO: 508585 - DNA, 30 bp, Artificial Sequence
  Synthetic oligonucleotide
aaaacttctgagttagcagccataaacgga

SEQ ID NO: 508586 - DNA, 30 bp, Artificial Sequence
  Synthetic oligonucleotide
cagtaaccgcattctcatcaagtaaacgga

SEQ ID NO: 508587 - DNA, 30 bp, Artificial Sequence
  Synthetic oligonucleotide
ccgttgagtcggacatccccgagcaacgga

SEQ ID NO: 508588 - DNA, 30 bp, Artificial Sequence
  Synthetic oligonucleotide
gaataattgtttgtcaagctgcctaacgga

SEQ ID NO: 508589 - DNA, 31 bp, Artificial Sequence
  Synthetic oligonucleotide
tagcgtcgttatgtggtagccgcgtaacgga

SEQ ID NO: 508590 - DNA, 30 bp, Artificial Sequence
  Synthetic oligonucleotide
ggcctttgctgtagatgattgtttaacgga

SEQ ID NO: 508591 - DNA, 30 bp, Artificial Sequence
  Synthetic oligonucleotide
ctaaatctaatccgcactttcccacacgga

SEQ ID NO: 508592 - DNA, 30 bp, Artificial Sequence
  Synthetic oligonucleotide
ccatccatcgctgagcacgccgcacacgga

SEQ ID NO: 508593 - DNA, 30 bp, Artificial Sequence
  Synthetic oligonucleotide
gtaggtcatccaatgtcggcacgacacgga

SEQ ID NO: 508594 - DNA, 30 bp, Artificial Sequence
  Synthetic oligonucleotide
tcagctttccgacctatctatcgacacgga

SEQ ID NO: 508595 - DNA, 30 bp, Artificial Sequence
  Synthetic oligonucleotide
atgcccgccttagaacaaattgtacacgga

SEQ ID NO: 508596 - DNA, 26 bp, Artificial Sequence
  Synthetic oligonucleotide
cccagacaatatttaaccatcacgga

SEQ ID NO: 508597 - DNA, 30 bp, Artificial Sequence
  Synthetic oligonucleotide
ccagccgatcccccaatgggttatcacgga

SEQ ID NO: 508598 - DNA, 30 bp, Artificial Sequence
  Synthetic oligonucleotide
atcgccgcgcagcgcccatgttaagacgga

SEQ ID NO: 508599 - DNA, 30 bp, Artificial Sequence
  Synthetic oligonucleotide
tgttttagggaagtaatggctggagacgga

SEQ ID NO: 508600 - DNA, 30 bp, Artificial Sequence
  Synthetic oligonucleotide
aggcggcaggagtgcgtgaaataggacgga

SEQ ID NO: 508601 - DNA, 30 bp, Artificial Sequence
  Synthetic oligonucleotide
catgatttagttaatgcatcttcggacgga

SEQ ID NO: 508602 - DNA, 30 bp, Artificial Sequence
  Synthetic oligonucleotide
agatcaggccccctacctccactatacgga

SEQ ID NO: 508603 - DNA, 30 bp, Artificial Sequence
  Synthetic oligonucleotide
attagacctaaatggccgctcgtatacgga

SEQ ID NO: 508604 - DNA, 30 bp, Artificial Sequence
  Synthetic oligonucleotide
ggaagacgctctaacgggagcagctacgga

SEQ ID NO: 508605 - DNA, 30 bp, Artificial Sequence
  Synthetic oligonucleotide
ctttgtcatcaagttacaaagctctacgga

SEQ ID NO: 508606 - DNA, 30 bp, Artificial Sequence
  Synthetic oligonucleotide
accgaaacactgtttcagttggtctacgga

SEQ ID NO: 508607 - DNA, 30 bp, Artificial Sequence
  Synthetic oligonucleotide
atgcgtcgacgagtagctcactcttacgga

SEQ ID NO: 508608 - DNA, 30 bp, Artificial Sequence
  Synthetic oligonucleotide
ccgaggaccgcgagactggtggacaccgga

SEQ ID NO: 508609 - DNA, 30 bp, Artificial Sequence
  Synthetic oligonucleotide
gattataagttctttcttgtttccaccgga

SEQ ID NO: 508610 - DNA, 40 bp, Artificial Sequence
  Synthetic oligonucleotide
aaataggtgtcgcttccttgcgtaccagccgcagaccgga

SEQ ID NO: 508611 - DNA, 30 bp, Artificial Sequence
  Synthetic oligonucleotide
accttctacggctttggtccgttgaccgga

SEQ ID NO: 508612 - DNA, 30 bp, Artificial Sequence
  Synthetic oligonucleotide
gctcaataaggcggttacgccgttaccgga

SEQ ID NO: 508613 - DNA, 30 bp, Artificial Sequence
  Synthetic oligonucleotide
gggatgcaatgcccgggtattcgacccgga

SEQ ID NO: 508614 - DNA, 30 bp, Artificial Sequence
  Synthetic oligonucleotide
acatcgggtctgaaagtcaggttccccgga

SEQ ID NO: 508615 - DNA, 30 bp, Artificial Sequence
  Synthetic oligonucleotide
aggtatggaaggaaatacggcgaagccgga

SEQ ID NO: 508616 - DNA, 30 bp, Artificial Sequence
  Synthetic oligonucleotide
agcttcatcgacctgtcacaacacgccgga

SEQ ID NO: 508617 - DNA, 30 bp, Artificial Sequence
  Synthetic oligonucleotide
aatatcataaccaacgaaaccagcgccgga

SEQ ID NO: 508618 - DNA, 30 bp, Artificial Sequence
  Synthetic oligonucleotide
ttcaagggataggcccacgtcccggccgga

SEQ ID NO: 508619 - DNA, 30 bp, Artificial Sequence
  Synthetic oligonucleotide
attttcgttggatccgtcgcgagggccgga

SEQ ID NO: 508620 - DNA, 30 bp, Artificial Sequence
  Synthetic oligonucleotide
ttaagtatcgtagggtcagtgtgtgccgga

SEQ ID NO: 508621 - DNA, 30 bp, Artificial Sequence
  Synthetic oligonucleotide
ggcactccggggtaataaccatactccgga

SEQ ID NO: 508622 - DNA, 30 bp, Artificial Sequence
  Synthetic oligonucleotide
atagctttatttaaccagggtttctccgga

SEQ ID NO: 508623 - DNA, 30 bp, Artificial Sequence
  Synthetic oligonucleotide
tccgaaggacaagtgaaagctatgtccgga

SEQ ID NO: 508624 - DNA, 30 bp, Artificial Sequence
  Synthetic oligonucleotide
agcgtctcctttcatttgagggtgtccgga

SEQ ID NO: 508625 - DNA, 30 bp, Artificial Sequence
  Synthetic oligonucleotide
aattggccaatttagattgtgaattccgga

SEQ ID NO: 508626 - DNA, 30 bp, Artificial Sequence
  Synthetic oligonucleotide
ggaagatttcagcatcaccttgtaagcgga

SEQ ID NO: 508627 - DNA, 30 bp, Artificial Sequence
  Synthetic oligonucleotide
gaaagttggagggtcacaatcgccagcgga

SEQ ID NO: 508628 - DNA, 30 bp, Artificial Sequence
  Synthetic oligonucleotide
ctaaaacgcatgatgctcccttggagcgga

SEQ ID NO: 508629 - DNA, 30 bp, Artificial Sequence
  Synthetic oligonucleotide
cccccctgaagtaagccgaatagtagcgga

SEQ ID NO: 508630 - DNA, 30 bp, Artificial Sequence
  Synthetic oligonucleotide
aacggtatccgttatctatgaatacgcgga

SEQ ID NO: 508631 - DNA, 30 bp, Artificial Sequence
  Synthetic oligonucleotide
cttttgatttctgattctaatgagcgcgga

SEQ ID NO: 508632 - DNA, 30 bp, Artificial Sequence
  Synthetic oligonucleotide
ggggaagggcagcaagaccatgctcgcgga

SEQ ID NO: 508633 - DNA, 30 bp, Artificial Sequence
  Synthetic oligonucleotide
atcaggcaatcaaattgccagattcgcgga

SEQ ID NO: 508634 - DNA, 29 bp, Artificial Sequence
  Synthetic oligonucleotide
gctatacgcagccgcgtgttaacggcgga

SEQ ID NO: 508635 - DNA, 30 bp, Artificial Sequence
  Synthetic oligonucleotide
aaatccacccaacgtccaactgacggcgga

SEQ ID NO: 508636 - DNA, 30 bp, Artificial Sequence
  Synthetic oligonucleotide
gcgcatacagcgggcttagtgacgggcgga

SEQ ID NO: 508637 - DNA, 30 bp, Artificial Sequence
  Synthetic oligonucleotide
ggatttggagtctctgtatccgtctgcgga

SEQ ID NO: 508638 - DNA, 30 bp, Artificial Sequence
  Synthetic oligonucleotide
gtttctgagcttaatatcatgtcaatcgga

SEQ ID NO: 508639 - DNA, 30 bp, Artificial Sequence
  Synthetic oligonucleotide
gttctagtctattaccgattgtcaatcgga

SEQ ID NO: 508640 - DNA, 30 bp, Artificial Sequence
  Synthetic oligonucleotide
gaatataccccgaggcgctcatccatcgga

SEQ ID NO: 508641 - DNA, 30 bp, Artificial Sequence
  Synthetic oligonucleotide
ttggcgctaggatcgcggccctgcatcgga

SEQ ID NO: 508642 - DNA, 30 bp, Artificial Sequence
  Synthetic oligonucleotide
cccacggacaccttgcaggggctcatcgga

SEQ ID NO: 508643 - DNA, 30 bp, Artificial Sequence
  Synthetic oligonucleotide
atttgtcaagcttgtgtccgtgcactcgga

SEQ ID NO: 508644 - DNA, 30 bp, Artificial Sequence
  Synthetic oligonucleotide
gctagctgagttaatccactgctactcgga

SEQ ID NO: 508645 - DNA, 30 bp, Artificial Sequence
  Synthetic oligonucleotide
aatcccttgaccccgcgccaatgagtcgga

SEQ ID NO: 508646 - DNA, 30 bp, Artificial Sequence
  Synthetic oligonucleotide
agactttttatcgagggaggaatagtcgga

SEQ ID NO: 508647 - DNA, 30 bp, Artificial Sequence
  Synthetic oligonucleotide
aaaacttgtttctgagattttaccgtcgga

SEQ ID NO: 508648 - DNA, 30 bp, Artificial Sequence
  Synthetic oligonucleotide
tggagcgcggtatgtagtgcatgtgtcgga

SEQ ID NO: 508649 - DNA, 30 bp, Artificial Sequence
  Synthetic oligonucleotide
agaatttgatcggcactgtctgttgtcgga

SEQ ID NO: 508650 - DNA, 30 bp, Artificial Sequence
  Synthetic oligonucleotide
ggccctacttgggtgtaaggttttgtcgga

SEQ ID NO: 508651 - DNA, 30 bp, Artificial Sequence
  Synthetic oligonucleotide
ctcaacagccgcctgctaagccgattcgga

SEQ ID NO: 508652 - DNA, 30 bp, Artificial Sequence
  Synthetic oligonucleotide
tatgggggttcgtttttaaaggtcttcgga

SEQ ID NO: 508653 - DNA, 30 bp, Artificial Sequence
  Synthetic oligonucleotide
accccgcactcaaattgcttcgtgttcgga

SEQ ID NO: 508654 - DNA, 30 bp, Artificial Sequence
  Synthetic oligonucleotide
ctggacaaactcgattattaaaatttcgga

SEQ ID NO: 508655 - DNA, 30 bp, Artificial Sequence
  Synthetic oligonucleotide
acaactttagaatgggcagctcgtttcgga

SEQ ID NO: 508656 - DNA, 30 bp, Artificial Sequence
  Synthetic oligonucleotide
tcaattttgtattcgttgttgcaaaaggga

SEQ ID NO: 508657 - DNA, 30 bp, Artificial Sequence
  Synthetic oligonucleotide
aaatgttagcactttcatattatcaaggga

SEQ ID NO: 508658 - DNA, 30 bp, Artificial Sequence
  Synthetic oligonucleotide
gacgcgcgaagtcgcacaacttcgaaggga

SEQ ID NO: 508659 - DNA, 30 bp, Artificial Sequence
  Synthetic oligonucleotide
tccctggctaccaaagtcccattacaggga

SEQ ID NO: 508660 - DNA, 30 bp, Artificial Sequence
  Synthetic oligonucleotide
ggtgataaaaaggagggccagacccaggga

SEQ ID NO: 508661 - DNA, 30 bp, Artificial Sequence
  Synthetic oligonucleotide
gctgttaatctttcgaagtagtgccaggga

SEQ ID NO: 508662 - DNA, 30 bp, Artificial Sequence
  Synthetic oligonucleotide
ctacttgaggtaacggaatgcccagaggga

SEQ ID NO: 508663 - DNA, 31 bp, Artificial Sequence
  Synthetic oligonucleotide
agctaaactgagggtggtaaacgcagaggga

SEQ ID NO: 508664 - DNA, 30 bp, Artificial Sequence
  Synthetic oligonucleotide
tttttcctctattcggagcaatcagaggga

SEQ ID NO: 508665 - DNA, 30 bp, Artificial Sequence
  Synthetic oligonucleotide
tactcaccggtgtaccgaggtgacgaggga

SEQ ID NO: 508666 - DNA, 30 bp, Artificial Sequence
  Synthetic oligonucleotide
tgggttatccgacccggcggtggcgaggga

SEQ ID NO: 508667 - DNA, 30 bp, Artificial Sequence
  Synthetic oligonucleotide
atgtccgagaggactactgtctaggaggga

SEQ ID NO: 508668 - DNA, 30 bp, Artificial Sequence
  Synthetic oligonucleotide
ccgttttggagacgaggcttagcggaggga

SEQ ID NO: 508669 - DNA, 30 bp, Artificial Sequence
  Synthetic oligonucleotide
cgagaagaaactccagttcagagggaggga

SEQ ID NO: 508670 - DNA, 40 bp, Artificial Sequence
  Synthetic oligonucleotide
aagataataaattcatggtatggtcggggatcgggaggga

SEQ ID NO: 508671 - DNA, 39 bp, Artificial Sequence
  Synthetic oligonucleotide
aagataatacattctggtatggtcggggatcgggaggga

SEQ ID NO: 508672 - DNA, 30 bp, Artificial Sequence
  Synthetic oligonucleotide
ataaccatccttaagctttctttggaggga

SEQ ID NO: 508673 - DNA, 30 bp, Artificial Sequence
  Synthetic oligonucleotide
gacagatcgaagtacaggcatactgaggga

SEQ ID NO: 508674 - DNA, 30 bp, Artificial Sequence
  Synthetic oligonucleotide
atatgtaagcggaagctagtaggataggga

SEQ ID NO: 508675 - DNA, 30 bp, Artificial Sequence
  Synthetic oligonucleotide
tcctctatgtaaattcatgcttcgtaggga

SEQ ID NO: 508676 - DNA, 30 bp, Artificial Sequence
  Synthetic oligonucleotide
ctcggcttagttgtcaccaccgggtaggga

SEQ ID NO: 508677 - DNA, 30 bp, Artificial Sequence
  Synthetic oligonucleotide
tgaggctacccgggtaacgtccattaggga

SEQ ID NO: 508678 - DNA, 30 bp, Artificial Sequence
  Synthetic oligonucleotide
agttagattcacgtgcttcaatattaggga

SEQ ID NO: 508679 - DNA, 30 bp, Artificial Sequence
  Synthetic oligonucleotide
gaggagaggcaatcacccttgtcttaggga

SEQ ID NO: 508680 - DNA, 30 bp, Artificial Sequence
  Synthetic oligonucleotide
gacttgatgaaacggagggttcgaacggga

SEQ ID NO: 508681 - DNA, 30 bp, Artificial Sequence
  Synthetic oligonucleotide
cttgaagggtaccacgtagatagcacggga

SEQ ID NO: 508682 - DNA, 30 bp, Artificial Sequence
  Synthetic oligonucleotide
gatacgaggaagccgcggcgcaggacggga

SEQ ID NO: 508683 - DNA, 30 bp, Artificial Sequence
  Synthetic oligonucleotide
gcgaaagtagggagtataaaaaaaccggga

SEQ ID NO: 508684 - DNA, 30 bp, Artificial Sequence
  Synthetic oligonucleotide
ttctcacaagaaggattcgacaagccggga

SEQ ID NO: 508685 - DNA, 30 bp, Artificial Sequence
  Synthetic oligonucleotide
gttttctttgtccatgaccccaagccggga

SEQ ID NO: 508686 - DNA, 30 bp, Artificial Sequence
  Synthetic oligonucleotide
tcgtaccgacgtttggcctcctggccggga

SEQ ID NO: 508687 - DNA, 30 bp, Artificial Sequence
  Synthetic oligonucleotide
attactcgagtgggactaatctgtccggga

SEQ ID NO: 508688 - DNA, 30 bp, Artificial Sequence
  Synthetic oligonucleotide
gatatcgaagccttattcggtaatgcggga

SEQ ID NO: 508689 - DNA, 30 bp, Artificial Sequence
  Synthetic oligonucleotide
tgtaattctaactcctattactaatcggga

SEQ ID NO: 508690 - DNA, 30 bp, Artificial Sequence
  Synthetic oligonucleotide
gttgcagggatagcattaaatgcatcggga

SEQ ID NO: 508691 - DNA, 30 bp, Artificial Sequence
  Synthetic oligonucleotide
tatagacctgacggtacagcatcatcggga

SEQ ID NO: 508692 - DNA, 30 bp, Artificial Sequence
  Synthetic oligonucleotide
gaagacttcagagtacaaaattcatcggga

SEQ ID NO: 508693 - DNA, 30 bp, Artificial Sequence
  Synthetic oligonucleotide
taggagggccctgtagctaggccctcggga

SEQ ID NO: 508694 - DNA, 30 bp, Artificial Sequence
  Synthetic oligonucleotide
ccccttcatatcatggtattgcagtcggga

SEQ ID NO: 508695 - DNA, 30 bp, Artificial Sequence
  Synthetic oligonucleotide
agttgtcatgaagatttggggatttcggga

SEQ ID NO: 508696 - DNA, 30 bp, Artificial Sequence
  Synthetic oligonucleotide
atctttgagagatttgcctcacaaagggga

SEQ ID NO: 508697 - DNA, 30 bp, Artificial Sequence
  Synthetic oligonucleotide
aaaacgtaaagaagaccctgtataagggga

SEQ ID NO: 508698 - DNA, 30 bp, Artificial Sequence
  Synthetic oligonucleotide
gggtttctcacgatgaagcactccagggga

SEQ ID NO: 508699 - DNA, 30 bp, Artificial Sequence
  Synthetic oligonucleotide
cggtcggcagagttggagatctgcagggga

SEQ ID NO: 508700 - DNA, 30 bp, Artificial Sequence
  Synthetic oligonucleotide
gctgaacgagcaggacacgcctcgagggga

SEQ ID NO: 508701 - DNA, 40 bp, Artificial Sequence
  Synthetic oligonucleotide
aagataatacattaatggtatggtcggggatcggagggga

SEQ ID NO: 508702 - DNA, 40 bp, Artificial Sequence
  Synthetic oligonucleotide
aagataagacattcatggtatggtcggggatcggagggga

SEQ ID NO: 508703 - DNA, 40 bp, Artificial Sequence
  Synthetic oligonucleotide
aagataatccattcatggtatggtcggggatcggagggga

SEQ ID NO: 508704 - DNA, 30 bp, Artificial Sequence
  Synthetic oligonucleotide
gaatgtccgcatggcagttgctttagggga

SEQ ID NO: 508705 - DNA, 31 bp, Artificial Sequence
  Synthetic oligonucleotide
aaagcacagcagagcacagtactcacgggga

SEQ ID NO: 508706 - DNA, 30 bp, Artificial Sequence
  Synthetic oligonucleotide
tttcatggtacgcacaagtgataccgggga

SEQ ID NO: 508707 - DNA, 30 bp, Artificial Sequence
  Synthetic oligonucleotide
gtgtaacgcttatgatgcaagtcccgggga

SEQ ID NO: 508708 - DNA, 30 bp, Artificial Sequence
  Synthetic oligonucleotide
agccttggccaagggtatacacatcgggga

SEQ ID NO: 508709 - DNA, 30 bp, Artificial Sequence
  Synthetic oligonucleotide
tacaacacccggatggggtagcttcgggga

SEQ ID NO: 508710 - DNA, 40 bp, Artificial Sequence
  Synthetic oligonucleotide
aaaataatacattcatggtatggtcggggatcgaggggga

SEQ ID NO: 508711 - DNA, 40 bp, Artificial Sequence
  Synthetic oligonucleotide
aagataatccattcatggtatggtcggggatcgaggggga

SEQ ID NO: 508712 - DNA, 40 bp, Artificial Sequence
  Synthetic oligonucleotide
aagataatacattcatggtattgtcggggatcgaggggga

SEQ ID NO: 508713 - DNA, 30 bp, Artificial Sequence
  Synthetic oligonucleotide
tccgactctcggcatataatctccggggga

SEQ ID NO: 508714 - DNA, 30 bp, Artificial Sequence
  Synthetic oligonucleotide
gagctacgttgaagcctgagcaggggggga

SEQ ID NO: 508715 - DNA, 40 bp, Artificial Sequence
  Synthetic oligonucleotide
aagataatacatgcatggtatggtcggggagcggggggga

SEQ ID NO: 508716 - DNA, 40 bp, Artificial Sequence
  Synthetic oligonucleotide
aagataatacattcatggtatggtcgcggatcggggggga

SEQ ID NO: 508717 - DNA, 40 bp, Artificial Sequence
  Synthetic oligonucleotide
aagataataaattcatggtatggtaggggatcggggggga

SEQ ID NO: 508718 - DNA, 40 bp, Artificial Sequence
  Synthetic oligonucleotide
aagataatacatgcatggtatgggcggggatcggggggga

SEQ ID NO: 508719 - DNA, 40 bp, Artificial Sequence
  Synthetic oligonucleotide
aagataatacattcagggtagggtcggggatcggggggga

SEQ ID NO: 508720 - DNA, 40 bp, Artificial Sequence
  Synthetic oligonucleotide
aagataatccattcatggtagggtcggggatcggggggga

SEQ ID NO: 508721 - DNA, 40 bp, Artificial Sequence
  Synthetic oligonucleotide
aagataatacatgcatgggatggtcggggatcggggggga

SEQ ID NO: 508722 - DNA, 40 bp, Artificial Sequence
  Synthetic oligonucleotide
aagataataaagtcatggtatggtcggggatcggggggga

SEQ ID NO: 508723 - DNA, 40 bp, Artificial Sequence
  Synthetic oligonucleotide
aagatatgacattcatggtatggtcggggatcggggggga

SEQ ID NO: 508724 - DNA, 40 bp, Artificial Sequence
  Synthetic oligonucleotide
aagtgaatacattcatggtatggtcggggatcggggggga

SEQ ID NO: 508725 - DNA, 40 bp, Artificial Sequence
  Synthetic oligonucleotide
aaggtattacattcatggtatggtcggggatcggggggga

SEQ ID NO: 508726 - DNA, 40 bp, Artificial Sequence
  Synthetic oligonucleotide
aagataatacattcagtgtatggtcggggatcggggggga

SEQ ID NO: 508727 - DNA, 40 bp, Artificial Sequence
  Synthetic oligonucleotide
aagataatccattcattgtatggtcggggatcggggggga

SEQ ID NO: 508728 - DNA, 40 bp, Artificial Sequence
  Synthetic oligonucleotide
aagataatacattcattgtattgtcggggatcggggggga

SEQ ID NO: 508729 - DNA, 40 bp, Artificial Sequence
  Synthetic oligonucleotide
aagataatacattcatgttattgtcggggatcggggggga

SEQ ID NO: 508730 - DNA, 40 bp, Artificial Sequence
  Synthetic oligonucleotide
aagataatacattcattgtatgttcggggatcggggggga

SEQ ID NO: 508731 - DNA, 40 bp, Artificial Sequence
  Synthetic oligonucleotide
aatataatacattcatggtatggtctgggatcggggggga

SEQ ID NO: 508732 - DNA, 40 bp, Artificial Sequence
  Synthetic oligonucleotide
aagataagacattcatggtatggtcggtgatcggggggga

SEQ ID NO: 508733 - DNA, 40 bp, Artificial Sequence
  Synthetic oligonucleotide
aagttaatacattcatggtatggtcggtgatcggggggga

SEQ ID NO: 508734 - DNA, 40 bp, Artificial Sequence
  Synthetic oligonucleotide
aagataatacattcattgtatggtcggtgatcggggggga

SEQ ID NO: 508735 - DNA, 40 bp, Artificial Sequence
  Synthetic oligonucleotide
aagataatacattcatggtatggtcgttgatcggggggga

SEQ ID NO: 508736 - DNA, 40 bp, Artificial Sequence
  Synthetic oligonucleotide
aagataatccattcatggtatggtcgggtatcggggggga

SEQ ID NO: 508737 - DNA, 40 bp, Artificial Sequence
  Synthetic oligonucleotide
aagataacacattcatggtatggtcggggttcggggggga

SEQ ID NO: 508738 - DNA, 40 bp, Artificial Sequence
  Synthetic oligonucleotide
aagataatacattcatggtatggtcggtgttcggggggga

SEQ ID NO: 508739 - DNA, 40 bp, Artificial Sequence
  Synthetic oligonucleotide
aagataatacattcatggtatggtcggggatgggggggga

SEQ ID NO: 508740 - DNA, 40 bp, Artificial Sequence
  Synthetic oligonucleotide
aagataatacattcatggtatggtcgtggatctgggggga

SEQ ID NO: 508741 - DNA, 30 bp, Artificial Sequence
  Synthetic oligonucleotide
gatatttttagaataatcctcaatggggga

SEQ ID NO: 508742 - DNA, 40 bp, Artificial Sequence
  Synthetic oligonucleotide
aagataatacatgcatggtatggtcggggatcgtggggga

SEQ ID NO: 508743 - DNA, 40 bp, Artificial Sequence
  Synthetic oligonucleotide
aagagaatacattcatggtatggtcggggatcgtggggga

SEQ ID NO: 508744 - DNA, 40 bp, Artificial Sequence
  Synthetic oligonucleotide
aagataatacattcattgtatggtcggggatcgtggggga

SEQ ID NO: 508745 - DNA, 40 bp, Artificial Sequence
  Synthetic oligonucleotide
aagataatacattcatggtattgtcggggatcgtggggga

SEQ ID NO: 508746 - DNA, 30 bp, Artificial Sequence
  Synthetic oligonucleotide
tcgaatgacatggatggtgacgcatgggga

SEQ ID NO: 508747 - DNA, 30 bp, Artificial Sequence
  Synthetic oligonucleotide
ggaactgttcggggttccgtcacctgggga

SEQ ID NO: 508748 - DNA, 30 bp, Artificial Sequence
  Synthetic oligonucleotide
ctcccagccacttccgcgtcgctctgggga

SEQ ID NO: 508749 - DNA, 40 bp, Artificial Sequence
  Synthetic oligonucleotide
aagataagacattcatggtatggtcggggatcggtgggga

SEQ ID NO: 508750 - DNA, 40 bp, Artificial Sequence
  Synthetic oligonucleotide
aagataatacattcatggtatggtcggggatcgttgggga

SEQ ID NO: 508751 - DNA, 30 bp, Artificial Sequence
  Synthetic oligonucleotide
ggaacgaagtcagcgccattcaaaatggga

SEQ ID NO: 508752 - DNA, 30 bp, Artificial Sequence
  Synthetic oligonucleotide
ctagcttctgtttaagccacgataatggga

SEQ ID NO: 508753 - DNA, 30 bp, Artificial Sequence
  Synthetic oligonucleotide
tacattcagtgtcattgtaatagtatggga

SEQ ID NO: 508754 - DNA, 30 bp, Artificial Sequence
  Synthetic oligonucleotide
aatcggaatggcagcagcacaggtatggga

SEQ ID NO: 508755 - DNA, 30 bp, Artificial Sequence
  Synthetic oligonucleotide
gctcctaggagtgcgaagtacggtatggga

SEQ ID NO: 508756 - DNA, 30 bp, Artificial Sequence
  Synthetic oligonucleotide
attcaataaagtgctatcacgattatggga

SEQ ID NO: 508757 - DNA, 30 bp, Artificial Sequence
  Synthetic oligonucleotide
aaaataaaaaagtagcagcatgttatggga

SEQ ID NO: 508758 - DNA, 30 bp, Artificial Sequence
  Synthetic oligonucleotide
tttccaacgcgtagaggcttggcactggga

SEQ ID NO: 508759 - DNA, 30 bp, Artificial Sequence
  Synthetic oligonucleotide
tctctgcctctcctgaagcaggacctggga

SEQ ID NO: 508760 - DNA, 30 bp, Artificial Sequence
  Synthetic oligonucleotide
attgcattcagtatacccacgtggctggga

SEQ ID NO: 508761 - DNA, 30 bp, Artificial Sequence
  Synthetic oligonucleotide
tcccgcccttgtagccgtacatctctggga

SEQ ID NO: 508762 - DNA, 30 bp, Artificial Sequence
  Synthetic oligonucleotide
cttttcgctatagcggcacttgaagtggga

SEQ ID NO: 508763 - DNA, 30 bp, Artificial Sequence
  Synthetic oligonucleotide
cgggagagcgtctctgagtaatgagtggga

SEQ ID NO: 508764 - DNA, 40 bp, Artificial Sequence
  Synthetic oligonucleotide
aagatactacattcatggtatggtcggggatcgggtggga

SEQ ID NO: 508765 - DNA, 30 bp, Artificial Sequence
  Synthetic oligonucleotide
ttttggcaatcaggcctgttattggtggga

SEQ ID NO: 508766 - DNA, 30 bp, Artificial Sequence
  Synthetic oligonucleotide
ccctccgcaggaattaaaaagaatgtggga

SEQ ID NO: 508767 - DNA, 30 bp, Artificial Sequence
  Synthetic oligonucleotide
tacgggaaatttaggcaagagcctgtggga

SEQ ID NO: 508768 - DNA, 30 bp, Artificial Sequence
  Synthetic oligonucleotide
tcccttcctttgccgcgacgttttgtggga

SEQ ID NO: 508769 - DNA, 30 bp, Artificial Sequence
  Synthetic oligonucleotide
aaatgattacgtgggatcatcagattggga

SEQ ID NO: 508770 - DNA, 28 bp, Artificial Sequence
  Synthetic oligonucleotide
gatatacagttattatcccatattggga

SEQ ID NO: 508771 - DNA, 30 bp, Artificial Sequence
  Synthetic oligonucleotide
catttcctagggcccaatcttttattggga

SEQ ID NO: 508772 - DNA, 30 bp, Artificial Sequence
  Synthetic oligonucleotide
taaagctttcatatatgggagttcttggga

SEQ ID NO: 508773 - DNA, 30 bp, Artificial Sequence
  Synthetic oligonucleotide
gtgtatgtcctgacgaagttccagttggga

SEQ ID NO: 508774 - DNA, 30 bp, Artificial Sequence
  Synthetic oligonucleotide
gccccatgtcaacagtgttttccgttggga

SEQ ID NO: 508775 - DNA, 40 bp, Artificial Sequence
  Synthetic oligonucleotide
aagataatacattcatggtatggtcggggatcggttggga

SEQ ID NO: 508776 - DNA, 30 bp, Artificial Sequence
  Synthetic oligonucleotide
tctctactctagcgtgtatagtttttggga

SEQ ID NO: 508777 - DNA, 30 bp, Artificial Sequence
  Synthetic oligonucleotide
tttagttttagaaacatatttaaaaatgga

SEQ ID NO: 508778 - DNA, 30 bp, Artificial Sequence
  Synthetic oligonucleotide
gtgattgcgaaactgcgtgcccaaaatgga

SEQ ID NO: 508779 - DNA, 30 bp, Artificial Sequence
  Synthetic oligonucleotide
aatttctattccgacaaactaaacaatgga

SEQ ID NO: 508780 - DNA, 30 bp, Artificial Sequence
  Synthetic oligonucleotide
gtagcaggctggtaagaggccgacaatgga

SEQ ID NO: 508781 - DNA, 30 bp, Artificial Sequence
  Synthetic oligonucleotide
aacgggtacgttgggagagctaagaatgga

SEQ ID NO: 508782 - DNA, 30 bp, Artificial Sequence
  Synthetic oligonucleotide
ggctctgcggtaataggccggattaatgga

SEQ ID NO: 508783 - DNA, 30 bp, Artificial Sequence
  Synthetic oligonucleotide
ttttgatcgtaagtgtagaatgcacatgga

SEQ ID NO: 508784 - DNA, 30 bp, Artificial Sequence
  Synthetic oligonucleotide
ctgcgatgcaacaccttgcctagccatgga

SEQ ID NO: 508785 - DNA, 30 bp, Artificial Sequence
  Synthetic oligonucleotide
taaagttgtccgggtggaactacgcatgga

SEQ ID NO: 508786 - DNA, 30 bp, Artificial Sequence
  Synthetic oligonucleotide
tgtgagtagaccgagctccatagtcatgga

SEQ ID NO: 508787 - DNA, 30 bp, Artificial Sequence
  Synthetic oligonucleotide
tttgcttcgtcgcgacgtagccttcatgga

SEQ ID NO: 508788 - DNA, 30 bp, Artificial Sequence
  Synthetic oligonucleotide
agagagagtgttcttcaatttcaagatgga

SEQ ID NO: 508789 - DNA, 30 bp, Artificial Sequence
  Synthetic oligonucleotide
acccgcctcgcgttcggtatttcagatgga

SEQ ID NO: 508790 - DNA, 30 bp, Artificial Sequence
  Synthetic oligonucleotide
ctaaacacgtgactgcgagtcagagatgga

SEQ ID NO: 508791 - DNA, 30 bp, Artificial Sequence
  Synthetic oligonucleotide
cagaggtttacgttcggtatttacgatgga

SEQ ID NO: 508792 - DNA, 30 bp, Artificial Sequence
  Synthetic oligonucleotide
ataataggtttttgcaaatacgtcgatgga

SEQ ID NO: 508793 - DNA, 30 bp, Artificial Sequence
  Synthetic oligonucleotide
gtagccaagattatacgagattatgatgga

SEQ ID NO: 508794 - DNA, 30 bp, Artificial Sequence
  Synthetic oligonucleotide
atcacaggtaaggtagggctctttgatgga

SEQ ID NO: 508795 - DNA, 30 bp, Artificial Sequence
  Synthetic oligonucleotide
accgcaacgagtcgaagcgtgcaatatgga

SEQ ID NO: 508796 - DNA, 30 bp, Artificial Sequence
  Synthetic oligonucleotide
agtcagctatccacgcaacctggatatgga

SEQ ID NO: 508797 - DNA, 30 bp, Artificial Sequence
  Synthetic oligonucleotide
gaaaccatctgtcatacataaacctatgga

SEQ ID NO: 508798 - DNA, 30 bp, Artificial Sequence
  Synthetic oligonucleotide
gagtgaggttaggccgttataccctatgga

SEQ ID NO: 508799 - DNA, 30 bp, Artificial Sequence
  Synthetic oligonucleotide
tctccatcgctttttaaaggcgtgtatgga

SEQ ID NO: 508800 - DNA, 30 bp, Artificial Sequence
  Synthetic oligonucleotide
tgggctcaaccttagaggcagcattatgga

SEQ ID NO: 508801 - DNA, 30 bp, Artificial Sequence
  Synthetic oligonucleotide
cgccctaaagaccgacggcgagaaactgga

SEQ ID NO: 508802 - DNA, 30 bp, Artificial Sequence
  Synthetic oligonucleotide
cctatcagaatcgtcagtaacgcaactgga

SEQ ID NO: 508803 - DNA, 30 bp, Artificial Sequence
  Synthetic oligonucleotide
gcacctattccccggggaataggaactgga

SEQ ID NO: 508804 - DNA, 30 bp, Artificial Sequence
  Synthetic oligonucleotide
gagtccttgctacagggataagtcactgga

SEQ ID NO: 508805 - DNA, 30 bp, Artificial Sequence
  Synthetic oligonucleotide
ggcaataggtatccctgaaggacgactgga

SEQ ID NO: 508806 - DNA, 30 bp, Artificial Sequence
  Synthetic oligonucleotide
gggaaatatcattatgcttccgtgactgga

SEQ ID NO: 508807 - DNA, 30 bp, Artificial Sequence
  Synthetic oligonucleotide
acaccggctttctgaaaagctcaacctgga

SEQ ID NO: 508808 - DNA, 30 bp, Artificial Sequence
  Synthetic oligonucleotide
ggagtgggcagctagggtggagaccctgga

SEQ ID NO: 508809 - DNA, 30 bp, Artificial Sequence
  Synthetic oligonucleotide
tttcggctaaccttgatcgctgggcctgga

SEQ ID NO: 508810 - DNA, 30 bp, Artificial Sequence
  Synthetic oligonucleotide
ttaaaaacgggctcttagtagatgcctgga

SEQ ID NO: 508811 - DNA, 30 bp, Artificial Sequence
  Synthetic oligonucleotide
cccttatctaaatggttacgcggagctgga

SEQ ID NO: 508812 - DNA, 29 bp, Artificial Sequence
  Synthetic oligonucleotide
ttggaatcgacgcccactaccacgctgga

SEQ ID NO: 508813 - DNA, 30 bp, Artificial Sequence
  Synthetic oligonucleotide
gacttagtgcatcctgtttgagacgctgga

SEQ ID NO: 508814 - DNA, 30 bp, Artificial Sequence
  Synthetic oligonucleotide
gacggaccgtgtctaatttacacggctgga

SEQ ID NO: 508815 - DNA, 30 bp, Artificial Sequence
  Synthetic oligonucleotide
ctgcccgacgctgctcctgcacgggctgga

SEQ ID NO: 508816 - DNA, 30 bp, Artificial Sequence
  Synthetic oligonucleotide
ataaggacgtattgcctagtacatgctgga

SEQ ID NO: 508817 - DNA, 30 bp, Artificial Sequence
  Synthetic oligonucleotide
caggtacaagtttcgatggtagcatctgga

SEQ ID NO: 508818 - DNA, 30 bp, Artificial Sequence
  Synthetic oligonucleotide
actttagtggatcattgtctttagtctgga

SEQ ID NO: 508819 - DNA, 30 bp, Artificial Sequence
  Synthetic oligonucleotide
aggaaagtcgggcgcaactacagttctgga

SEQ ID NO: 508820 - DNA, 30 bp, Artificial Sequence
  Synthetic oligonucleotide
ggcaagtcaaccattatgtcacgcagtgga

SEQ ID NO: 508821 - DNA, 30 bp, Artificial Sequence
  Synthetic oligonucleotide
acgtcccagggtatcaacagtcgcagtgga

SEQ ID NO: 508822 - DNA, 30 bp, Artificial Sequence
  Synthetic oligonucleotide
acactattcgttgtatccccatagagtgga

SEQ ID NO: 508823 - DNA, 30 bp, Artificial Sequence
  Synthetic oligonucleotide
ggcttcttgcgtgttggtccgctgagtgga

SEQ ID NO: 508824 - DNA, 30 bp, Artificial Sequence
  Synthetic oligonucleotide
gctactatctgacgtggaacctaacgtgga

SEQ ID NO: 508825 - DNA, 30 bp, Artificial Sequence
  Synthetic oligonucleotide
ttctgggcatttattgtctatttacgtgga

SEQ ID NO: 508826 - DNA, 30 bp, Artificial Sequence
  Synthetic oligonucleotide
acgaaggcttgaatgtacgcagagcgtgga

SEQ ID NO: 508827 - DNA, 30 bp, Artificial Sequence
  Synthetic oligonucleotide
tctagtaggaccatcatgcctacgcgtgga

SEQ ID NO: 508828 - DNA, 30 bp, Artificial Sequence
  Synthetic oligonucleotide
gttaagatttgttgtgtgtatgtgcgtgga

SEQ ID NO: 508829 - DNA, 30 bp, Artificial Sequence
  Synthetic oligonucleotide
cgatgtgtctaccttacggtctctcgtgga

SEQ ID NO: 508830 - DNA, 30 bp, Artificial Sequence
  Synthetic oligonucleotide
ggtaccgtgcctcggtgaaagctaggtgga

SEQ ID NO: 508831 - DNA, 30 bp, Artificial Sequence
  Synthetic oligonucleotide
aaagagtgacagtcgtcctacttaggtgga

SEQ ID NO: 508832 - DNA, 30 bp, Artificial Sequence
  Synthetic oligonucleotide
cttacatgcttaatgtactcttgcggtgga

SEQ ID NO: 508833 - DNA, 40 bp, Artificial Sequence
  Synthetic oligonucleotide
aagataatacattcatagtatggtcggggatcggggtgga

SEQ ID NO: 508834 - DNA, 40 bp, Artificial Sequence
  Synthetic oligonucleotide
aaggtaatacattcatggtatggtcggggatcggggtgga

SEQ ID NO: 508835 - DNA, 40 bp, Artificial Sequence
  Synthetic oligonucleotide
aagataatccattcatggtatggtcggggatcggggtgga

SEQ ID NO: 508836 - DNA, 30 bp, Artificial Sequence
  Synthetic oligonucleotide
gttaattgccatgcactgcgggaatgtgga

SEQ ID NO: 508837 - DNA, 30 bp, Artificial Sequence
  Synthetic oligonucleotide
ggtttttcctgtcactcgagagcatgtgga

SEQ ID NO: 508838 - DNA, 30 bp, Artificial Sequence
  Synthetic oligonucleotide
agttccctggagtccatatccaagtgtgga

SEQ ID NO: 508839 - DNA, 30 bp, Artificial Sequence
  Synthetic oligonucleotide
aagcaatgtactgtcttcaattaaattgga

SEQ ID NO: 508840 - DNA, 30 bp, Artificial Sequence
  Synthetic oligonucleotide
cgtaggtttaaaatacgtacgtgaattgga

SEQ ID NO: 508841 - DNA, 30 bp, Artificial Sequence
  Synthetic oligonucleotide
ggtctcatcccacaagatacgctaattgga

SEQ ID NO: 508842 - DNA, 30 bp, Artificial Sequence
  Synthetic oligonucleotide
tgtggggccaagggccggagtaacattgga

SEQ ID NO: 508843 - DNA, 30 bp, Artificial Sequence
  Synthetic oligonucleotide
agggcctcaacgtttaagaagtccattgga

SEQ ID NO: 508844 - DNA, 30 bp, Artificial Sequence
  Synthetic oligonucleotide
acgaggattttgctctcgtcacgcattgga

SEQ ID NO: 508845 - DNA, 30 bp, Artificial Sequence
  Synthetic oligonucleotide
ctccatacggttaaagagcggtgcattgga

SEQ ID NO: 508846 - DNA, 30 bp, Artificial Sequence
  Synthetic oligonucleotide
tccagctaggatgaagaatgagatattgga

SEQ ID NO: 508847 - DNA, 30 bp, Artificial Sequence
  Synthetic oligonucleotide
ctactaatttacgcatcgcctactattgga

SEQ ID NO: 508848 - DNA, 30 bp, Artificial Sequence
  Synthetic oligonucleotide
cttttctttgaccagccgtaaagtattgga

SEQ ID NO: 508849 - DNA, 30 bp, Artificial Sequence
  Synthetic oligonucleotide
cctagttgctccgaagacatatgtattgga

SEQ ID NO: 508850 - DNA, 30 bp, Artificial Sequence
  Synthetic oligonucleotide
agatactttctagcctagagcaaacttgga

SEQ ID NO: 508851 - DNA, 30 bp, Artificial Sequence
  Synthetic oligonucleotide
ctatggagacgcctgatcaattaacttgga

SEQ ID NO: 508852 - DNA, 30 bp, Artificial Sequence
  Synthetic oligonucleotide
tccctcacttcgccgttaaaatgacttgga

SEQ ID NO: 508853 - DNA, 30 bp, Artificial Sequence
  Synthetic oligonucleotide
ctaacaagcgtagaatcacaaaaccttgga

SEQ ID NO: 508854 - DNA, 30 bp, Artificial Sequence
  Synthetic oligonucleotide
tgattagttgcatacagaccagatcttgga

SEQ ID NO: 508855 - DNA, 30 bp, Artificial Sequence
  Synthetic oligonucleotide
gcagtatccagggccagaggctaagttgga

SEQ ID NO: 508856 - DNA, 30 bp, Artificial Sequence
  Synthetic oligonucleotide
cagctacaaccatggagtgatatggttgga

SEQ ID NO: 508857 - DNA, 30 bp, Artificial Sequence
  Synthetic oligonucleotide
atgaagccacttaacggtggatcttttgga

SEQ ID NO: 508858 - DNA, 30 bp, Artificial Sequence
  Synthetic oligonucleotide
ataagtccgcgagaaacctgtagttttgga

SEQ ID NO: 508859 - DNA, 30 bp, Artificial Sequence
  Synthetic oligonucleotide
atcatcttcatttaacatatccgttttgga

SEQ ID NO: 508860 - DNA, 30 bp, Artificial Sequence
  Synthetic oligonucleotide
cccgattcaaaaaactggagatgttttgga

SEQ ID NO: 508861 - DNA, 30 bp, Artificial Sequence
  Synthetic oligonucleotide
gcagttaaaatggtattaaccctttttgga

SEQ ID NO: 508862 - DNA, 30 bp, Artificial Sequence
  Synthetic oligonucleotide
agctatttcaagcctccttctccaaaatga

SEQ ID NO: 508863 - DNA, 30 bp, Artificial Sequence
  Synthetic oligonucleotide
tgtcgtgggcgcaaccctttctgaaaatga

SEQ ID NO: 508864 - DNA, 30 bp, Artificial Sequence
  Synthetic oligonucleotide
gactcacgtgggggaggtcgcttaaaatga

SEQ ID NO: 508865 - DNA, 30 bp, Artificial Sequence
  Synthetic oligonucleotide
tcgagcccttggaacgccgcgctcaaatga

SEQ ID NO: 508866 - DNA, 30 bp, Artificial Sequence
  Synthetic oligonucleotide
ttatccagtaatgtccgtagcgatcaatga

SEQ ID NO: 508867 - DNA, 30 bp, Artificial Sequence
  Synthetic oligonucleotide
gtttgcgaattatcatgttgacttcaatga

SEQ ID NO: 508868 - DNA, 30 bp, Artificial Sequence
  Synthetic oligonucleotide
catcgggctcttggcggctcaacagaatga

SEQ ID NO: 508869 - DNA, 30 bp, Artificial Sequence
  Synthetic oligonucleotide
gaactccgcggaccagtcgatgcagaatga

SEQ ID NO: 508870 - DNA, 30 bp, Artificial Sequence
  Synthetic oligonucleotide
tagctttgctatcgagcaaaactcgaatga

SEQ ID NO: 508871 - DNA, 30 bp, Artificial Sequence
  Synthetic oligonucleotide
gtgatccagcatgttcccttaagggaatga

SEQ ID NO: 508872 - DNA, 30 bp, Artificial Sequence
  Synthetic oligonucleotide
atttctccagtccaatagcacactgaatga

SEQ ID NO: 508873 - DNA, 30 bp, Artificial Sequence
  Synthetic oligonucleotide
gaaggaatgtggactcttacggtataatga

SEQ ID NO: 508874 - DNA, 30 bp, Artificial Sequence
  Synthetic oligonucleotide
ccgcattgctgaatgggaattctctaatga

SEQ ID NO: 508875 - DNA, 30 bp, Artificial Sequence
  Synthetic oligonucleotide
gtattgcactagctaagactcttttaatga

SEQ ID NO: 508876 - DNA, 30 bp, Artificial Sequence
  Synthetic oligonucleotide
tagtcatgatgtgtccagctgtcaacatga

SEQ ID NO: 508877 - DNA, 30 bp, Artificial Sequence
  Synthetic oligonucleotide
tttagtgtttaaaaatcgcaatttacatga

SEQ ID NO: 508878 - DNA, 30 bp, Artificial Sequence
  Synthetic oligonucleotide
ttccaggtctcaggcaagccgcgaccatga

SEQ ID NO: 508879 - DNA, 30 bp, Artificial Sequence
  Synthetic oligonucleotide
taaaaatcgtttgccaggtatcgaccatga

SEQ ID NO: 508880 - DNA, 30 bp, Artificial Sequence
  Synthetic oligonucleotide
gcagcagcagcggacgtgcacggaccatga

SEQ ID NO: 508881 - DNA, 30 bp, Artificial Sequence
  Synthetic oligonucleotide
acatcaatggtgggtatatccgagccatga

SEQ ID NO: 508882 - DNA, 30 bp, Artificial Sequence
  Synthetic oligonucleotide
gctacgtcaaaaaggcttttgaacgcatga

SEQ ID NO: 508883 - DNA, 30 bp, Artificial Sequence
  Synthetic oligonucleotide
gtctagtgtccctgtattcagcacgcatga

SEQ ID NO: 508884 - DNA, 30 bp, Artificial Sequence
  Synthetic oligonucleotide
tggtaaataaagtacacggttccggcatga

SEQ ID NO: 508885 - DNA, 30 bp, Artificial Sequence
  Synthetic oligonucleotide
tgccagggaggagcgggaagaaatgcatga

SEQ ID NO: 508886 - DNA, 30 bp, Artificial Sequence
  Synthetic oligonucleotide
gggagacattcggtacagatacgtgcatga

SEQ ID NO: 508887 - DNA, 30 bp, Artificial Sequence
  Synthetic oligonucleotide
ctcagtatggacccggttaggtaatcatga

SEQ ID NO: 508888 - DNA, 30 bp, Artificial Sequence
  Synthetic oligonucleotide
accggacttaatgcgggcgcacgatcatga

SEQ ID NO: 508889 - DNA, 30 bp, Artificial Sequence
  Synthetic oligonucleotide
tgaatagccggagctggtttgtgatcatga

SEQ ID NO: 508890 - DNA, 30 bp, Artificial Sequence
  Synthetic oligonucleotide
gggtttatattctcggatatgatctcatga

SEQ ID NO: 508891 - DNA, 30 bp, Artificial Sequence
  Synthetic oligonucleotide
ttaaagttccgggcgctggacaagtcatga

SEQ ID NO: 508892 - DNA, 25 bp, Artificial Sequence
  Synthetic oligonucleotide
aataggaattgcctttacttcatga

SEQ ID NO: 508893 - DNA, 30 bp, Artificial Sequence
  Synthetic oligonucleotide
cagaaatcatgaaagacaggagcttcatga

SEQ ID NO: 508894 - DNA, 30 bp, Artificial Sequence
  Synthetic oligonucleotide
ggctttcaggacggattggaaatttcatga

SEQ ID NO: 508895 - DNA, 30 bp, Artificial Sequence
  Synthetic oligonucleotide
gcacctttagcagaaaagtgctaaagatga

SEQ ID NO: 508896 - DNA, 30 bp, Artificial Sequence
  Synthetic oligonucleotide
gattttgtcagtaagagccttttaagatga

SEQ ID NO: 508897 - DNA, 30 bp, Artificial Sequence
  Synthetic oligonucleotide
gccccatttagatcggggtggtccagatga

SEQ ID NO: 508898 - DNA, 30 bp, Artificial Sequence
  Synthetic oligonucleotide
tagagaaagtagtcgacgttttccagatga

SEQ ID NO: 508899 - DNA, 30 bp, Artificial Sequence
  Synthetic oligonucleotide
cacgatcacttggacaccggtgtcagatga

SEQ ID NO: 508900 - DNA, 30 bp, Artificial Sequence
  Synthetic oligonucleotide
aaccagactacagtcagagtgacgagatga

SEQ ID NO: 508901 - DNA, 30 bp, Artificial Sequence
  Synthetic oligonucleotide
ctctgggttccttttacagaagggagatga

SEQ ID NO: 508902 - DNA, 30 bp, Artificial Sequence
  Synthetic oligonucleotide
aataagaaacaccaacaaggcgggagatga

SEQ ID NO: 508903 - DNA, 30 bp, Artificial Sequence
  Synthetic oligonucleotide
ttgcgctccgtagttcgagtagtgagatga

SEQ ID NO: 508904 - DNA, 30 bp, Artificial Sequence
  Synthetic oligonucleotide
ccttttagaggttctttatcatgtagatga

SEQ ID NO: 508905 - DNA, 30 bp, Artificial Sequence
  Synthetic oligonucleotide
cgtcagctacatattcgcttgtaacgatga

SEQ ID NO: 508906 - DNA, 30 bp, Artificial Sequence
  Synthetic oligonucleotide
ggccacgttatggcaagcaggtcacgatga

SEQ ID NO: 508907 - DNA, 30 bp, Artificial Sequence
  Synthetic oligonucleotide
ggtaaaaagattaaccagtcaagacgatga

SEQ ID NO: 508908 - DNA, 30 bp, Artificial Sequence
  Synthetic oligonucleotide
tgatacatttattagctccgcaagcgatga

SEQ ID NO: 508909 - DNA, 30 bp, Artificial Sequence
  Synthetic oligonucleotide
tacaacctcaaaccgtctgtgaagcgatga

SEQ ID NO: 508910 - DNA, 30 bp, Artificial Sequence
  Synthetic oligonucleotide
gttaaacgtcatcgtagataccagcgatga

SEQ ID NO: 508911 - DNA, 30 bp, Artificial Sequence
  Synthetic oligonucleotide
cgatgcatccatacagcttttccaggatga

SEQ ID NO: 508912 - DNA, 30 bp, Artificial Sequence
  Synthetic oligonucleotide
gggcacagctgtcgcatgcaatcaggatga

SEQ ID NO: 508913 - DNA, 30 bp, Artificial Sequence
  Synthetic oligonucleotide
gacttcgtagtaagtgttagccccggatga

SEQ ID NO: 508914 - DNA, 30 bp, Artificial Sequence
  Synthetic oligonucleotide
gccatcatcaggaataagctcgtatgatga

SEQ ID NO: 508915 - DNA, 30 bp, Artificial Sequence
  Synthetic oligonucleotide
tcagtagatacacttcaggttagctgatga

SEQ ID NO: 508916 - DNA, 30 bp, Artificial Sequence
  Synthetic oligonucleotide
tctctgtctgtagagatagtttcaatatga

SEQ ID NO: 508917 - DNA, 30 bp, Artificial Sequence
  Synthetic oligonucleotide
gagatcaggatctggagtacgagaatatga

SEQ ID NO: 508918 - DNA, 30 bp, Artificial Sequence
  Synthetic oligonucleotide
aggacaaacactttgaaaccaataatatga

SEQ ID NO: 508919 - DNA, 30 bp, Artificial Sequence
  Synthetic oligonucleotide
aaaaataattccgcattacaaaccatatga

SEQ ID NO: 508920 - DNA, 29 bp, Artificial Sequence
  Synthetic oligonucleotide
actagagatcgactgggatctccatatga

SEQ ID NO: 508921 - DNA, 30 bp, Artificial Sequence
  Synthetic oligonucleotide
atatggttagctccatagtaatatatatga

SEQ ID NO: 508922 - DNA, 30 bp, Artificial Sequence
  Synthetic oligonucleotide
gagcggtgtatacgccgcccatatatatga

SEQ ID NO: 508923 - DNA, 30 bp, Artificial Sequence
  Synthetic oligonucleotide
tcccgcgaggcacggttagttaaactatga

SEQ ID NO: 508924 - DNA, 30 bp, Artificial Sequence
  Synthetic oligonucleotide
gcgactgggcagcgtcgcgaggcactatga

SEQ ID NO: 508925 - DNA, 30 bp, Artificial Sequence
  Synthetic oligonucleotide
ataaacgattgtaaggtatcatcactatga

SEQ ID NO: 508926 - DNA, 30 bp, Artificial Sequence
  Synthetic oligonucleotide
gtttttcgtggtgcccttggcatactatga

SEQ ID NO: 508927 - DNA, 30 bp, Artificial Sequence
  Synthetic oligonucleotide
ggaattgcgaaccgacgttgtagcctatga

SEQ ID NO: 508928 - DNA, 30 bp, Artificial Sequence
  Synthetic oligonucleotide
cccggttcgaatcaaatagtgggtctatga

SEQ ID NO: 508929 - DNA, 30 bp, Artificial Sequence
  Synthetic oligonucleotide
ggatcccctgaactccgcgggacagtatga

SEQ ID NO: 508930 - DNA, 30 bp, Artificial Sequence
  Synthetic oligonucleotide
atagcgcggctccgtacttaccgagtatga

SEQ ID NO: 508931 - DNA, 30 bp, Artificial Sequence
  Synthetic oligonucleotide
aacgatttcgcatctccttagtacgtatga

SEQ ID NO: 508932 - DNA, 30 bp, Artificial Sequence
  Synthetic oligonucleotide
gaagcacgagttaaattggcgcaggtatga

SEQ ID NO: 508933 - DNA, 30 bp, Artificial Sequence
  Synthetic oligonucleotide
atttttagactatcaattgcgccggtatga

SEQ ID NO: 508934 - DNA, 30 bp, Artificial Sequence
  Synthetic oligonucleotide
gccattttccaagatccgactctggtatga

SEQ ID NO: 508935 - DNA, 30 bp, Artificial Sequence
  Synthetic oligonucleotide
gaccagatacaatatcaaactttggtatga

SEQ ID NO: 508936 - DNA, 30 bp, Artificial Sequence
  Synthetic oligonucleotide
tctcaaccgcttgatgtgatatcattatga

SEQ ID NO: 508937 - DNA, 30 bp, Artificial Sequence
  Synthetic oligonucleotide
ctaccgtcgcatactcggcgagccttatga

SEQ ID NO: 508938 - DNA, 30 bp, Artificial Sequence
  Synthetic oligonucleotide
ggacgcgagtagtcgtcggtccgcttatga

SEQ ID NO: 508939 - DNA, 30 bp, Artificial Sequence
  Synthetic oligonucleotide
cattagaggagcatcggctcggtgttatga

SEQ ID NO: 508940 - DNA, 30 bp, Artificial Sequence
  Synthetic oligonucleotide
gcctcaggctggaatcataagaatttatga

SEQ ID NO: 508941 - DNA, 30 bp, Artificial Sequence
  Synthetic oligonucleotide
taatactggcgatcccgcttacatttatga

SEQ ID NO: 508942 - DNA, 30 bp, Artificial Sequence
  Synthetic oligonucleotide
cccgagatgtgtgtgcgcggccatttatga

SEQ ID NO: 508943 - DNA, 30 bp, Artificial Sequence
  Synthetic oligonucleotide
taattgtgcaagtatattccttatttatga

SEQ ID NO: 508944 - DNA, 30 bp, Artificial Sequence
  Synthetic oligonucleotide
gaccttgggcttccgcagcaacgtttatga

SEQ ID NO: 508945 - DNA, 31 bp, Artificial Sequence
  Synthetic oligonucleotide
gtagctgcctttgggaacataagcaaactga

SEQ ID NO: 508946 - DNA, 30 bp, Artificial Sequence
  Synthetic oligonucleotide
caatggcgcagcggagctatatcaaactga

SEQ ID NO: 508947 - DNA, 26 bp, Artificial Sequence
  Synthetic oligonucleotide
ctacaagtgcatctcgatgaaactga

SEQ ID NO: 508948 - DNA, 30 bp, Artificial Sequence
  Synthetic oligonucleotide
cgtggagagctccttgatacagtaaactga

SEQ ID NO: 508949 - DNA, 30 bp, Artificial Sequence
  Synthetic oligonucleotide
gatagttagaactccgttaggaacaactga

SEQ ID NO: 508950 - DNA, 30 bp, Artificial Sequence
  Synthetic oligonucleotide
tacgtgtgtcagagcgcaagagtcaactga

SEQ ID NO: 508951 - DNA, 30 bp, Artificial Sequence
  Synthetic oligonucleotide
gacgcaggggatggtagtcaaacgaactga

SEQ ID NO: 508952 - DNA, 30 bp, Artificial Sequence
  Synthetic oligonucleotide
gattcaaccgcgcctcagaggatgaactga

SEQ ID NO: 508953 - DNA, 30 bp, Artificial Sequence
  Synthetic oligonucleotide
atgacagatagaatcgggtatagtaactga

SEQ ID NO: 508954 - DNA, 30 bp, Artificial Sequence
  Synthetic oligonucleotide
cgcatctgttagctcctatagccgcactga

SEQ ID NO: 508955 - DNA, 30 bp, Artificial Sequence
  Synthetic oligonucleotide
gcattctgcaaggatattctgaggcactga

SEQ ID NO: 508956 - DNA, 30 bp, Artificial Sequence
  Synthetic oligonucleotide
ttttgcctggaggagtagcatgctcactga

SEQ ID NO: 508957 - DNA, 30 bp, Artificial Sequence
  Synthetic oligonucleotide
tcccaacaaatcgacacggaaaaagactga

SEQ ID NO: 508958 - DNA, 30 bp, Artificial Sequence
  Synthetic oligonucleotide
atataataatggagccatcagtgagactga

SEQ ID NO: 508959 - DNA, 30 bp, Artificial Sequence
  Synthetic oligonucleotide
cagcgatcagaggtagaacttgtagactga

SEQ ID NO: 508960 - DNA, 30 bp, Artificial Sequence
  Synthetic oligonucleotide
agatccgtctttattgccgttgtagactga

SEQ ID NO: 508961 - DNA, 30 bp, Artificial Sequence
  Synthetic oligonucleotide
tcctggcaggtgcaaactgattcggactga

SEQ ID NO: 508962 - DNA, 30 bp, Artificial Sequence
  Synthetic oligonucleotide
cgtcggcccccaagtgacagtgatgactga

SEQ ID NO: 508963 - DNA, 30 bp, Artificial Sequence
  Synthetic oligonucleotide
cgataaatgtggaccggcttatatgactga

SEQ ID NO: 508964 - DNA, 30 bp, Artificial Sequence
  Synthetic oligonucleotide
tttgcattgcttctgttaagttatgactga

SEQ ID NO: 508965 - DNA, 30 bp, Artificial Sequence
  Synthetic oligonucleotide
gcaatacaaagtattacaagcctgtactga

SEQ ID NO: 508966 - DNA, 30 bp, Artificial Sequence
  Synthetic oligonucleotide
ggcaatcaatctactgcataaggttactga

SEQ ID NO: 508967 - DNA, 30 bp, Artificial Sequence
  Synthetic oligonucleotide
tgtgaccaacatagagttgacaaaacctga

SEQ ID NO: 508968 - DNA, 30 bp, Artificial Sequence
  Synthetic oligonucleotide
ggagttccgaaaccacagaggtaaacctga

SEQ ID NO: 508969 - DNA, 30 bp, Artificial Sequence
  Synthetic oligonucleotide
actctccgagcaaggtcaacagtaacctga

SEQ ID NO: 508970 - DNA, 30 bp, Artificial Sequence
  Synthetic oligonucleotide
gctttggcgattcgttcagtaattacctga

SEQ ID NO: 508971 - DNA, 30 bp, Artificial Sequence
  Synthetic oligonucleotide
gcaaagttgaatttagcgtaagttacctga

SEQ ID NO: 508972 - DNA, 30 bp, Artificial Sequence
  Synthetic oligonucleotide
tatccggacacgggcagacactcgccctga

SEQ ID NO: 508973 - DNA, 30 bp, Artificial Sequence
  Synthetic oligonucleotide
gtttatacttttgaagggtccctatcctga

SEQ ID NO: 508974 - DNA, 30 bp, Artificial Sequence
  Synthetic oligonucleotide
cgcaatttgtaaagcgcccacttatcctga

SEQ ID NO: 508975 - DNA, 30 bp, Artificial Sequence
  Synthetic oligonucleotide
ctctctttcattacggagggtatgtcctga

SEQ ID NO: 508976 - DNA, 30 bp, Artificial Sequence
  Synthetic oligonucleotide
ctctattggtgtttctggatcgcttcctga

SEQ ID NO: 508977 - DNA, 30 bp, Artificial Sequence
  Synthetic oligonucleotide
aggtctggtaatgtccttacccaaagctga

SEQ ID NO: 508978 - DNA, 30 bp, Artificial Sequence
  Synthetic oligonucleotide
tttaatgagtacggcgcctttcaaagctga

SEQ ID NO: 508979 - DNA, 30 bp, Artificial Sequence
  Synthetic oligonucleotide
cttactcccctattagagtcgtgcagctga

SEQ ID NO: 508980 - DNA, 30 bp, Artificial Sequence
  Synthetic oligonucleotide
aattgcaggaaacaccttttatgtagctga

SEQ ID NO: 508981 - DNA, 30 bp, Artificial Sequence
  Synthetic oligonucleotide
tgggccatctttcaacgacttttacgctga

SEQ ID NO: 508982 - DNA, 30 bp, Artificial Sequence
  Synthetic oligonucleotide
ctcgttgccgcgccctggttacatcgctga

SEQ ID NO: 508983 - DNA, 28 bp, Artificial Sequence
  Synthetic oligonucleotide
atcactctcggtcgtcgcatatcgctga

SEQ ID NO: 508984 - DNA, 30 bp, Artificial Sequence
  Synthetic oligonucleotide
gaagacgcatagcgggttgaaacaggctga

SEQ ID NO: 508985 - DNA, 30 bp, Artificial Sequence
  Synthetic oligonucleotide
cgctgtacgtattatagccgggtaggctga

SEQ ID NO: 508986 - DNA, 30 bp, Artificial Sequence
  Synthetic oligonucleotide
ggttcttgcggctccaaagtatccggctga

SEQ ID NO: 508987 - DNA, 30 bp, Artificial Sequence
  Synthetic oligonucleotide
gcgcagactactgccgaagcatcgggctga

SEQ ID NO: 508988 - DNA, 30 bp, Artificial Sequence
  Synthetic oligonucleotide
gtctaacgtcttaagcaatcgcatggctga

SEQ ID NO: 508989 - DNA, 30 bp, Artificial Sequence
  Synthetic oligonucleotide
gagggttgtctcggcgcaaaagttggctga

SEQ ID NO: 508990 - DNA, 30 bp, Artificial Sequence
  Synthetic oligonucleotide
aaataggacccggagtcacaactatgctga

SEQ ID NO: 508991 - DNA, 30 bp, Artificial Sequence
  Synthetic oligonucleotide
atttcgtgaacgttttcgcaattatgctga

SEQ ID NO: 508992 - DNA, 30 bp, Artificial Sequence
  Synthetic oligonucleotide
gctatgtacatctgttctctaagttgctga

SEQ ID NO: 508993 - DNA, 30 bp, Artificial Sequence
  Synthetic oligonucleotide
ctttttaggctatggacaacagagatctga

SEQ ID NO: 508994 - DNA, 30 bp, Artificial Sequence
  Synthetic oligonucleotide
ataggcatgcattgcaaggaccatatctga

SEQ ID NO: 508995 - DNA, 30 bp, Artificial Sequence
  Synthetic oligonucleotide
gatggctaatatcactcgagatctatctga

SEQ ID NO: 508996 - DNA, 30 bp, Artificial Sequence
  Synthetic oligonucleotide
gagtccatcgcgatcacatggaaactctga

SEQ ID NO: 508997 - DNA, 30 bp, Artificial Sequence
  Synthetic oligonucleotide
acttgattttgtacaaaggatcttctctga

SEQ ID NO: 508998 - DNA, 30 bp, Artificial Sequence
  Synthetic oligonucleotide
actaaataaaatgaccttcgagacgtctga

SEQ ID NO: 508999 - DNA, 30 bp, Artificial Sequence
  Synthetic oligonucleotide
gggtgtctaagttagttcggccctgtctga

SEQ ID NO: 509000 - DNA, 30 bp, Artificial Sequence
  Synthetic oligonucleotide
gttctcataaaaacgggcactggtgtctga

SEQ ID NO: 509001 - DNA, 30 bp, Artificial Sequence
  Synthetic oligonucleotide
gttgtgtcatacgagcactgagttgtctga

SEQ ID NO: 509002 - DNA, 30 bp, Artificial Sequence
  Synthetic oligonucleotide
gtataacagtagaagtttcgattcttctga

SEQ ID NO: 509003 - DNA, 30 bp, Artificial Sequence
  Synthetic oligonucleotide
ttgtggctccgctcttactaccaaaagtga

SEQ ID NO: 509004 - DNA, 30 bp, Artificial Sequence
  Synthetic oligonucleotide
ggaaggtacaattgtgatatgcggaagtga

SEQ ID NO: 509005 - DNA, 30 bp, Artificial Sequence
  Synthetic oligonucleotide
gttatggacgcagggtgcacaggacagtga

SEQ ID NO: 509006 - DNA, 30 bp, Artificial Sequence
  Synthetic oligonucleotide
aatttttgctcaaaaatatgatcccagtga

SEQ ID NO: 509007 - DNA, 30 bp, Artificial Sequence
  Synthetic oligonucleotide
atttttggtcgtataattcgccggcagtga

SEQ ID NO: 509008 - DNA, 30 bp, Artificial Sequence
  Synthetic oligonucleotide
gtatgaacaacgaggtaaatgcacgagtga

SEQ ID NO: 509009 - DNA, 30 bp, Artificial Sequence
  Synthetic oligonucleotide
gtgcatgcgaccaagaagaataaggagtga

SEQ ID NO: 509010 - DNA, 30 bp, Artificial Sequence
  Synthetic oligonucleotide
atataagggatcgaacacgcataggagtga

SEQ ID NO: 509011 - DNA, 30 bp, Artificial Sequence
  Synthetic oligonucleotide
ttccacaagccccacggtgaggcctagtga

SEQ ID NO: 509012 - DNA, 30 bp, Artificial Sequence
  Synthetic oligonucleotide
ggcgggaacctataactggatctctagtga

SEQ ID NO: 509013 - DNA, 30 bp, Artificial Sequence
  Synthetic oligonucleotide
gcgaacaggatcattctggtcttctagtga

SEQ ID NO: 509014 - DNA, 30 bp, Artificial Sequence
  Synthetic oligonucleotide
aacacataactagtgggtgcgttctagtga

SEQ ID NO: 509015 - DNA, 30 bp, Artificial Sequence
  Synthetic oligonucleotide
ttctgcgaagtcggtgagagctagtagtga

SEQ ID NO: 509016 - DNA, 30 bp, Artificial Sequence
  Synthetic oligonucleotide
cgctggaaggaaaaatagaattggtagtga

SEQ ID NO: 509017 - DNA, 30 bp, Artificial Sequence
  Synthetic oligonucleotide
ttccttgcggaaccctgcttgatgtagtga

SEQ ID NO: 509018 - DNA, 29 bp, Artificial Sequence
  Synthetic oligonucleotide
gctaccaggcgcagcgtacggtgtagtga

SEQ ID NO: 509019 - DNA, 30 bp, Artificial Sequence
  Synthetic oligonucleotide
gttgcagtgtaatagacggctttttagtga

SEQ ID NO: 509020 - DNA, 30 bp, Artificial Sequence
  Synthetic oligonucleotide
gcttagacggagcgtcatgaataaacgtga

SEQ ID NO: 509021 - DNA, 30 bp, Artificial Sequence
  Synthetic oligonucleotide
atacgggcaggtggaaagacgggaacgtga

SEQ ID NO: 509022 - DNA, 30 bp, Artificial Sequence
  Synthetic oligonucleotide
aaatattccaatctcggtcatgccacgtga

SEQ ID NO: 509023 - DNA, 30 bp, Artificial Sequence
  Synthetic oligonucleotide
atcgggcaaagcctgtggacgatcacgtga

SEQ ID NO: 509024 - DNA, 30 bp, Artificial Sequence
  Synthetic oligonucleotide
cgcaagtaatcactgaatcgcgtgacgtga

SEQ ID NO: 509025 - DNA, 30 bp, Artificial Sequence
  Synthetic oligonucleotide
atattacaggccccgacgccgcctacgtga

SEQ ID NO: 509026 - DNA, 30 bp, Artificial Sequence
  Synthetic oligonucleotide
cggatagtatgtactcattagggtacgtga

SEQ ID NO: 509027 - DNA, 30 bp, Artificial Sequence
  Synthetic oligonucleotide
cagaggtgttttcacgtagcaattacgtga

SEQ ID NO: 509028 - DNA, 30 bp, Artificial Sequence
  Synthetic oligonucleotide
ccaggggtgggagcggtacacccaccgtga

SEQ ID NO: 509029 - DNA, 30 bp, Artificial Sequence
  Synthetic oligonucleotide
gtttctagagctccattcacaggaccgtga

SEQ ID NO: 509030 - DNA, 30 bp, Artificial Sequence
  Synthetic oligonucleotide
cgtgtctttctttcttcctctatcccgtga

SEQ ID NO: 509031 - DNA, 30 bp, Artificial Sequence
  Synthetic oligonucleotide
gaccactcggctcagcttcataagccgtga

SEQ ID NO: 509032 - DNA, 30 bp, Artificial Sequence
  Synthetic oligonucleotide
tgacagctttttagtgtgttgcgtccgtga

SEQ ID NO: 509033 - DNA, 30 bp, Artificial Sequence
  Synthetic oligonucleotide
tcttatgcctacccgttgtcgacagcgtga

SEQ ID NO: 509034 - DNA, 30 bp, Artificial Sequence
  Synthetic oligonucleotide
gttcacaacttagcttccactatagcgtga

SEQ ID NO: 509035 - DNA, 30 bp, Artificial Sequence
  Synthetic oligonucleotide
cggacgtaattaccaaaaaaattcgcgtga

SEQ ID NO: 509036 - DNA, 30 bp, Artificial Sequence
  Synthetic oligonucleotide
gaacggaggtataagttatgtggggcgtga

SEQ ID NO: 509037 - DNA, 30 bp, Artificial Sequence
  Synthetic oligonucleotide
aagacaggagtggccacaaagatggcgtga

SEQ ID NO: 509038 - DNA, 29 bp, Artificial Sequence
  Synthetic oligonucleotide
tgtgagtcaaccgagattttcctgcgtga

SEQ ID NO: 509039 - DNA, 30 bp, Artificial Sequence
  Synthetic oligonucleotide
gtgcaatgagagatatacggaggaaggtga

SEQ ID NO: 509040 - DNA, 30 bp, Artificial Sequence
  Synthetic oligonucleotide
atttgatgcaactcatctctaagcaggtga

SEQ ID NO: 509041 - DNA, 30 bp, Artificial Sequence
  Synthetic oligonucleotide
tgccagcgaactctgtttagttgcaggtga

SEQ ID NO: 509042 - DNA, 30 bp, Artificial Sequence
  Synthetic oligonucleotide
ttttcctaggatataggatcgtataggtga

SEQ ID NO: 509043 - DNA, 30 bp, Artificial Sequence
  Synthetic oligonucleotide
attgaagctgcaccatctcactgtaggtga

SEQ ID NO: 509044 - DNA, 30 bp, Artificial Sequence
  Synthetic oligonucleotide
tctggatccacgacttcagtctgtaggtga

SEQ ID NO: 509045 - DNA, 30 bp, Artificial Sequence
  Synthetic oligonucleotide
ttcgatcgatcggcgtcttgagatcggtga

SEQ ID NO: 509046 - DNA, 30 bp, Artificial Sequence
  Synthetic oligonucleotide
aaaaaggattcatccgacacatctcggtga

SEQ ID NO: 509047 - DNA, 30 bp, Artificial Sequence
  Synthetic oligonucleotide
tctttacggtacgcaggaggcggagggtga

SEQ ID NO: 509048 - DNA, 30 bp, Artificial Sequence
  Synthetic oligonucleotide
tctaaatcacctacactaagcaccgggtga

SEQ ID NO: 509049 - DNA, 30 bp, Artificial Sequence
  Synthetic oligonucleotide
tgatggatgaccgattaaaatgccgggtga

SEQ ID NO: 509050 - DNA, 30 bp, Artificial Sequence
  Synthetic oligonucleotide
atgcgggtgcgaatgtataaaagcgggtga

SEQ ID NO: 509051 - DNA, 39 bp, Artificial Sequence
  Synthetic oligonucleotide
aagataatacattcatggtatggtcggggatcggggtga

SEQ ID NO: 509052 - DNA, 40 bp, Artificial Sequence
  Synthetic oligonucleotide
aagataatacattcatggtatggtcggggagcgggggtga

SEQ ID NO: 509053 - DNA, 40 bp, Artificial Sequence
  Synthetic oligonucleotide
aagataagacattcatggtatggtcggggatcgggggtga

SEQ ID NO: 509054 - DNA, 40 bp, Artificial Sequence
  Synthetic oligonucleotide
aagagaatacattcatggtatggtcggggatcgggggtga

SEQ ID NO: 509055 - DNA, 30 bp, Artificial Sequence
  Synthetic oligonucleotide
caacatattaattgttttgcctgggggtga

SEQ ID NO: 509056 - DNA, 30 bp, Artificial Sequence
  Synthetic oligonucleotide
ttatctagtgcagaggttcccatggggtga

SEQ ID NO: 509057 - DNA, 30 bp, Artificial Sequence
  Synthetic oligonucleotide
acgtaggggttgcactctgatcatgggtga

SEQ ID NO: 509058 - DNA, 40 bp, Artificial Sequence
  Synthetic oligonucleotide
aagataatacattcatggtatggtcggggatcgtgggtga

SEQ ID NO: 509059 - DNA, 30 bp, Artificial Sequence
  Synthetic oligonucleotide
cactacaccccacctattctatgtgggtga

SEQ ID NO: 509060 - DNA, 30 bp, Artificial Sequence
  Synthetic oligonucleotide
agaccacgatatggaaatttatgtgggtga

SEQ ID NO: 509061 - DNA, 30 bp, Artificial Sequence
  Synthetic oligonucleotide
gttgttacgtacctgaaggtgtgtgggtga

SEQ ID NO: 509062 - DNA, 30 bp, Artificial Sequence
  Synthetic oligonucleotide
tgagcgacgtcatcacctcttcggtggtga

SEQ ID NO: 509063 - DNA, 30 bp, Artificial Sequence
  Synthetic oligonucleotide
ttcttctttgaagagaagcatccttggtga

SEQ ID NO: 509064 - DNA, 30 bp, Artificial Sequence
  Synthetic oligonucleotide
aaaaccgggttatggggataaagttggtga

SEQ ID NO: 509065 - DNA, 30 bp, Artificial Sequence
  Synthetic oligonucleotide
cgtcacccaaaaactaagtctgtttggtga

SEQ ID NO: 509066 - DNA, 30 bp, Artificial Sequence
  Synthetic oligonucleotide
ggtagctgtcaaattaatttccaaatgtga

SEQ ID NO: 509067 - DNA, 30 bp, Artificial Sequence
  Synthetic oligonucleotide
tgcacacgacctcacatatcgcggatgtga

SEQ ID NO: 509068 - DNA, 30 bp, Artificial Sequence
  Synthetic oligonucleotide
gtgcctgggcagatcccgaggtttatgtga

SEQ ID NO: 509069 - DNA, 31 bp, Artificial Sequence
  Synthetic oligonucleotide
tagaaaactatgtttgaagtaggcgctgtga

SEQ ID NO: 509070 - DNA, 30 bp, Artificial Sequence
  Synthetic oligonucleotide
ggattggatgtggtagtcggtctgctgtga

SEQ ID NO: 509071 - DNA, 30 bp, Artificial Sequence
  Synthetic oligonucleotide
ccggcgtcccacaagggttttcctctgtga

SEQ ID NO: 509072 - DNA, 30 bp, Artificial Sequence
  Synthetic oligonucleotide
caagcggtggagtagtggtgtaacgtgtga

SEQ ID NO: 509073 - DNA, 30 bp, Artificial Sequence
  Synthetic oligonucleotide
attcttgatttttggattgtcagtgtgtga

SEQ ID NO: 509074 - DNA, 30 bp, Artificial Sequence
  Synthetic oligonucleotide
ccggaagcacttcagaacacgaaattgtga

SEQ ID NO: 509075 - DNA, 30 bp, Artificial Sequence
  Synthetic oligonucleotide
ccaacttgcccagtggtgaggagattgtga

SEQ ID NO: 509076 - DNA, 30 bp, Artificial Sequence
  Synthetic oligonucleotide
gtaatctgatgggtcagggtgttattgtga

SEQ ID NO: 509077 - DNA, 30 bp, Artificial Sequence
  Synthetic oligonucleotide
tgactgcatcatagatcaattgacttgtga

SEQ ID NO: 509078 - DNA, 30 bp, Artificial Sequence
  Synthetic oligonucleotide
ttggattgctgtttcacagttgccttgtga

SEQ ID NO: 509079 - DNA, 30 bp, Artificial Sequence
  Synthetic oligonucleotide
ctttcggagagatagaggcagttcttgtga

SEQ ID NO: 509080 - DNA, 30 bp, Artificial Sequence
  Synthetic oligonucleotide
ggaggacgcagtttcgttattgggttgtga

SEQ ID NO: 509081 - DNA, 30 bp, Artificial Sequence
  Synthetic oligonucleotide
tatcttgaggatgataggggacctttgtga

SEQ ID NO: 509082 - DNA, 30 bp, Artificial Sequence
  Synthetic oligonucleotide
caagggtaaatggacggttttgaaaattga

SEQ ID NO: 509083 - DNA, 30 bp, Artificial Sequence
  Synthetic oligonucleotide
tacggttttcatctaatagcagacaattga

SEQ ID NO: 509084 - DNA, 30 bp, Artificial Sequence
  Synthetic oligonucleotide
aaaagtttgcagcggaaggtcaagaattga

SEQ ID NO: 509085 - DNA, 30 bp, Artificial Sequence
  Synthetic oligonucleotide
gatacagcctctaggtgaaactggaattga

SEQ ID NO: 509086 - DNA, 30 bp, Artificial Sequence
  Synthetic oligonucleotide
aagatgacacagcagttcgagattaattga

SEQ ID NO: 509087 - DNA, 29 bp, Artificial Sequence
  Synthetic oligonucleotide
tgagtgtatacacgccggttcttaattga

SEQ ID NO: 509088 - DNA, 30 bp, Artificial Sequence
  Synthetic oligonucleotide
aacggagattttccatatacgcgacattga

SEQ ID NO: 509089 - DNA, 30 bp, Artificial Sequence
  Synthetic oligonucleotide
gatggggcacatgaaatattaggacattga

SEQ ID NO: 509090 - DNA, 30 bp, Artificial Sequence
  Synthetic oligonucleotide
gtgatactccagctgcttccgtaccattga

SEQ ID NO: 509091 - DNA, 30 bp, Artificial Sequence
  Synthetic oligonucleotide
acacgattacgcagatcactaaagcattga

SEQ ID NO: 509092 - DNA, 30 bp, Artificial Sequence
  Synthetic oligonucleotide
ttttaacctacgacggtatagaggcattga

SEQ ID NO: 509093 - DNA, 30 bp, Artificial Sequence
  Synthetic oligonucleotide
aatagattgtgaagacgcgggcctcattga

SEQ ID NO: 509094 - DNA, 30 bp, Artificial Sequence
  Synthetic oligonucleotide
tttcatgtaaatggtttcaggagtcattga

SEQ ID NO: 509095 - DNA, 30 bp, Artificial Sequence
  Synthetic oligonucleotide
ttccttgatgtacccaatacgatcgattga

SEQ ID NO: 509096 - DNA, 30 bp, Artificial Sequence
  Synthetic oligonucleotide
aagaattttgtcaaccatcggtgggattga

SEQ ID NO: 509097 - DNA, 30 bp, Artificial Sequence
  Synthetic oligonucleotide
gatgttcccttctgcgatttctatgattga

SEQ ID NO: 509098 - DNA, 30 bp, Artificial Sequence
  Synthetic oligonucleotide
agggaaactaatactgcttttaaatattga

SEQ ID NO: 509099 - DNA, 30 bp, Artificial Sequence
  Synthetic oligonucleotide
gtcttatcaaggcggaattcaaactattga

SEQ ID NO: 509100 - DNA, 30 bp, Artificial Sequence
  Synthetic oligonucleotide
cctcaatgaagtgctgagcgcctctattga

SEQ ID NO: 509101 - DNA, 30 bp, Artificial Sequence
  Synthetic oligonucleotide
aaaacacgttgggggggtggatcttattga

SEQ ID NO: 509102 - DNA, 30 bp, Artificial Sequence
  Synthetic oligonucleotide
ttcagtgagcatcctaatatcctaacttga

SEQ ID NO: 509103 - DNA, 30 bp, Artificial Sequence
  Synthetic oligonucleotide
gagtacctgcacggaatttccagcacttga

SEQ ID NO: 509104 - DNA, 30 bp, Artificial Sequence
  Synthetic oligonucleotide
aaatagcctcccgcagcctcgagcacttga

SEQ ID NO: 509105 - DNA, 30 bp, Artificial Sequence
  Synthetic oligonucleotide
caaccctggactcgataggttgttacttga

SEQ ID NO: 509106 - DNA, 30 bp, Artificial Sequence
  Synthetic oligonucleotide
taacagcatgcaatcacgactcaaccttga

SEQ ID NO: 509107 - DNA, 30 bp, Artificial Sequence
  Synthetic oligonucleotide
gccaggatttagagtaaacttttaccttga

SEQ ID NO: 509108 - DNA, 30 bp, Artificial Sequence
  Synthetic oligonucleotide
gattgagggcattaaccacgtagtccttga

SEQ ID NO: 509109 - DNA, 30 bp, Artificial Sequence
  Synthetic oligonucleotide
aaattcaaggcgcagtatatatgtccttga

SEQ ID NO: 509110 - DNA, 30 bp, Artificial Sequence
  Synthetic oligonucleotide
gctgccaatcagcaggacacatacgcttga

SEQ ID NO: 509111 - DNA, 30 bp, Artificial Sequence
  Synthetic oligonucleotide
ggatttttccgtggggttttgagcgcttga

SEQ ID NO: 509112 - DNA, 30 bp, Artificial Sequence
  Synthetic oligonucleotide
aaaataattagtgtgcaatggggtgcttga

SEQ ID NO: 509113 - DNA, 30 bp, Artificial Sequence
  Synthetic oligonucleotide
aactgggatgtcttttgtattattgcttga

SEQ ID NO: 509114 - DNA, 30 bp, Artificial Sequence
  Synthetic oligonucleotide
acctctctctgggatgcactgtttgcttga

SEQ ID NO: 509115 - DNA, 30 bp, Artificial Sequence
  Synthetic oligonucleotide
gccaaccggatgtatctcagacaatcttga

SEQ ID NO: 509116 - DNA, 30 bp, Artificial Sequence
  Synthetic oligonucleotide
ccccttaggcctttatgtggaggatcttga

SEQ ID NO: 509117 - DNA, 30 bp, Artificial Sequence
  Synthetic oligonucleotide
ctgacataagactttagcggaggctcttga

SEQ ID NO: 509118 - DNA, 30 bp, Artificial Sequence
  Synthetic oligonucleotide
gaaactcgtaggatttgtcttgtttcttga

SEQ ID NO: 509119 - DNA, 30 bp, Artificial Sequence
  Synthetic oligonucleotide
tcgtcacggaactgtcgggcagaaagttga

SEQ ID NO: 509120 - DNA, 30 bp, Artificial Sequence
  Synthetic oligonucleotide
gctgttgaggacgtataacacgtcagttga

SEQ ID NO: 509121 - DNA, 30 bp, Artificial Sequence
  Synthetic oligonucleotide
aggcgtatggcgatcgggccggagagttga

SEQ ID NO: 509122 - DNA, 30 bp, Artificial Sequence
  Synthetic oligonucleotide
aggcctcactcacctaggctgcttagttga

SEQ ID NO: 509123 - DNA, 30 bp, Artificial Sequence
  Synthetic oligonucleotide
atcccgtaaaaggccgtattggaacgttga

SEQ ID NO: 509124 - DNA, 30 bp, Artificial Sequence
  Synthetic oligonucleotide
gcataatcggacctctgtgggatacgttga

SEQ ID NO: 509125 - DNA, 30 bp, Artificial Sequence
  Synthetic oligonucleotide
taactgcaataaccgcgaagcgtacgttga

SEQ ID NO: 509126 - DNA, 30 bp, Artificial Sequence
  Synthetic oligonucleotide
gtgggaactggtctagtttgccgccgttga

SEQ ID NO: 509127 - DNA, 30 bp, Artificial Sequence
  Synthetic oligonucleotide
tccaaatcagtagggctagtggagcgttga

SEQ ID NO: 509128 - DNA, 30 bp, Artificial Sequence
  Synthetic oligonucleotide
cttcaagtcttgcgcttaacaccgcgttga

SEQ ID NO: 509129 - DNA, 30 bp, Artificial Sequence
  Synthetic oligonucleotide
gtaatcgcacaccccctctgaccgcgttga

SEQ ID NO: 509130 - DNA, 30 bp, Artificial Sequence
  Synthetic oligonucleotide
ggttattggtcgacctagtaacatcgttga

SEQ ID NO: 509131 - DNA, 30 bp, Artificial Sequence
  Synthetic oligonucleotide
ccagatggttgaatggcagcgccaggttga

SEQ ID NO: 509132 - DNA, 30 bp, Artificial Sequence
  Synthetic oligonucleotide
gggatagagaattcaacaccgaagggttga

SEQ ID NO: 509133 - DNA, 40 bp, Artificial Sequence
  Synthetic oligonucleotide
aagataatacattcatggtatggtcggggatcggggttga

SEQ ID NO: 509134 - DNA, 30 bp, Artificial Sequence
  Synthetic oligonucleotide
atactagactggctacaagcatatggttga

SEQ ID NO: 509135 - DNA, 30 bp, Artificial Sequence
  Synthetic oligonucleotide
gttcccgaaacgctgctgttaagtggttga

SEQ ID NO: 509136 - DNA, 30 bp, Artificial Sequence
  Synthetic oligonucleotide
acatttgcgttctaggtccagattggttga

SEQ ID NO: 509137 - DNA, 30 bp, Artificial Sequence
  Synthetic oligonucleotide
agcgtttggattccgcggcaatttggttga

SEQ ID NO: 509138 - DNA, 30 bp, Artificial Sequence
  Synthetic oligonucleotide
cacagaggcccctcacgcctgaaatgttga

SEQ ID NO: 509139 - DNA, 30 bp, Artificial Sequence
  Synthetic oligonucleotide
gtttgcttctttcgcggtagttcgtgttga

SEQ ID NO: 509140 - DNA, 30 bp, Artificial Sequence
  Synthetic oligonucleotide
gttatcgatatagtaatttttttttgttga

SEQ ID NO: 509141 - DNA, 30 bp, Artificial Sequence
  Synthetic oligonucleotide
ggccatacttacctacacacgctaatttga

SEQ ID NO: 509142 - DNA, 30 bp, Artificial Sequence
  Synthetic oligonucleotide
tttgtgagctggattgtgcctaacatttga

SEQ ID NO: 509143 - DNA, 30 bp, Artificial Sequence
  Synthetic oligonucleotide
ggtccgtacaagattttggtccagatttga

SEQ ID NO: 509144 - DNA, 30 bp, Artificial Sequence
  Synthetic oligonucleotide
gaacactttaaatgatccggtaatatttga

SEQ ID NO: 509145 - DNA, 30 bp, Artificial Sequence
  Synthetic oligonucleotide
attttcaagagacacacccctcatatttga

SEQ ID NO: 509146 - DNA, 30 bp, Artificial Sequence
  Synthetic oligonucleotide
ctgcgttagacccactatgtggatatttga

SEQ ID NO: 509147 - DNA, 30 bp, Artificial Sequence
  Synthetic oligonucleotide
gcagtaaatcaaatgctggcccatctttga

SEQ ID NO: 509148 - DNA, 30 bp, Artificial Sequence
  Synthetic oligonucleotide
cgctcgcgcaaaaggggttcaggtctttga

SEQ ID NO: 509149 - DNA, 30 bp, Artificial Sequence
  Synthetic oligonucleotide
caaatattgtgacgcgaaacctacgtttga

SEQ ID NO: 509150 - DNA, 30 bp, Artificial Sequence
  Synthetic oligonucleotide
ctaccggataatgcgattgattaggtttga

SEQ ID NO: 509151 - DNA, 30 bp, Artificial Sequence
  Synthetic oligonucleotide
gacaaacctttggttaggacaagggtttga

SEQ ID NO: 509152 - DNA, 30 bp, Artificial Sequence
  Synthetic oligonucleotide
gatttccttgaaaccttaagtagtgtttga

SEQ ID NO: 509153 - DNA, 30 bp, Artificial Sequence
  Synthetic oligonucleotide
ttttaaacgagccggactcaggcattttga

SEQ ID NO: 509154 - DNA, 30 bp, Artificial Sequence
  Synthetic oligonucleotide
aaagccccgtttggattaaactacttttga

SEQ ID NO: 509155 - DNA, 30 bp, Artificial Sequence
  Synthetic oligonucleotide
cggtacgcggttaaaacttaaaagttttga

SEQ ID NO: 509156 - DNA, 30 bp, Artificial Sequence
  Synthetic oligonucleotide
cacgtgagagaagaggtataccagttttga

SEQ ID NO: 509157 - DNA, 30 bp, Artificial Sequence
  Synthetic oligonucleotide
cccgttttccaattgcggttaccgttttga

SEQ ID NO: 509158 - DNA, 30 bp, Artificial Sequence
  Synthetic oligonucleotide
gaagattttgtcaacctacagcggttttga

SEQ ID NO: 509159 - DNA, 30 bp, Artificial Sequence
  Synthetic oligonucleotide
tatgaccgattatagatttgggatttttga

SEQ ID NO: 509160 - DNA, 30 bp, Artificial Sequence
  Synthetic oligonucleotide
cggtggtgcaggtctgcaaacattttttga

SEQ ID NO: 509161 - DNA, 30 bp, Artificial Sequence
  Synthetic oligonucleotide
atctaaaagccatggcctccgcaaaaaata

SEQ ID NO: 509162 - DNA, 30 bp, Artificial Sequence
  Synthetic oligonucleotide
ggattgtttttttagcacatgtaaaaaata

SEQ ID NO: 509163 - DNA, 30 bp, Artificial Sequence
  Synthetic oligonucleotide
gatcaaagcacctgaggacaagcaaaaata

SEQ ID NO: 509164 - DNA, 30 bp, Artificial Sequence
  Synthetic oligonucleotide
ttccggtagatctaaaggtagggaaaaata

SEQ ID NO: 509165 - DNA, 30 bp, Artificial Sequence
  Synthetic oligonucleotide
cggataggtggttgtctccagaccaaaata

SEQ ID NO: 509166 - DNA, 30 bp, Artificial Sequence
  Synthetic oligonucleotide
gataaagactaaagcgtaaagggcaaaata

SEQ ID NO: 509167 - DNA, 30 bp, Artificial Sequence
  Synthetic oligonucleotide
cgccttttagactttgtttccctcaaaata

SEQ ID NO: 509168 - DNA, 30 bp, Artificial Sequence
  Synthetic oligonucleotide
tgggtgtggaacccttgaatacagaaaata

SEQ ID NO: 509169 - DNA, 30 bp, Artificial Sequence
  Synthetic oligonucleotide
agccgtcatcagggtgatccggggaaaata

SEQ ID NO: 509170 - DNA, 30 bp, Artificial Sequence
  Synthetic oligonucleotide
cggaggtcaggttagcgtattatgaaaata

SEQ ID NO: 509171 - DNA, 30 bp, Artificial Sequence
  Synthetic oligonucleotide
gctgaaggcgaaatgggatgaaataaaata

SEQ ID NO: 509172 - DNA, 30 bp, Artificial Sequence
  Synthetic oligonucleotide
tgttccggtatgtacctgtgcgataaaata

SEQ ID NO: 509173 - DNA, 30 bp, Artificial Sequence
  Synthetic oligonucleotide
atagagcggtgtaattaaacccttaaaata

SEQ ID NO: 509174 - DNA, 30 bp, Artificial Sequence
  Synthetic oligonucleotide
ctaacatcaaagtcgcggtcgagacaaata

SEQ ID NO: 509175 - DNA, 30 bp, Artificial Sequence
  Synthetic oligonucleotide
gtaacgtcgcgatgggcttcggcccaaata

SEQ ID NO: 509176 - DNA, 30 bp, Artificial Sequence
  Synthetic oligonucleotide
gaacgacaacgtgctgtttagggccaaata

SEQ ID NO: 509177 - DNA, 30 bp, Artificial Sequence
  Synthetic oligonucleotide
aatagtcgagtgttaccgtttaagcaaata

SEQ ID NO: 509178 - DNA, 30 bp, Artificial Sequence
  Synthetic oligonucleotide
gtcacaagatcaggacatgaagagcaaata

SEQ ID NO: 509179 - DNA, 30 bp, Artificial Sequence
  Synthetic oligonucleotide
cggttcgcagactagcaacctgcgcaaata

SEQ ID NO: 509180 - DNA, 30 bp, Artificial Sequence
  Synthetic oligonucleotide
gatccgcttgtcgggacaatgaggcaaata

SEQ ID NO: 509181 - DNA, 30 bp, Artificial Sequence
  Synthetic oligonucleotide
tattgcgtgctctggaacaggtggcaaata

SEQ ID NO: 509182 - DNA, 30 bp, Artificial Sequence
  Synthetic oligonucleotide
ccgtgcgcacattcgcacgcgtgtcaaata

SEQ ID NO: 509183 - DNA, 30 bp, Artificial Sequence
  Synthetic oligonucleotide
acccgctgggagcctttcttggttcaaata

SEQ ID NO: 509184 - DNA, 30 bp, Artificial Sequence
  Synthetic oligonucleotide
cgttttttgtacagataatgcaaagaaata

SEQ ID NO: 509185 - DNA, 30 bp, Artificial Sequence
  Synthetic oligonucleotide
taaatgaaacagcataagtcggaagaaata

SEQ ID NO: 509186 - DNA, 30 bp, Artificial Sequence
  Synthetic oligonucleotide
gatacccaaatgtcctacatagtggaaata

SEQ ID NO: 509187 - DNA, 30 bp, Artificial Sequence
  Synthetic oligonucleotide
taaacgttaacatgtaccgcgtcataaata

SEQ ID NO: 509188 - DNA, 30 bp, Artificial Sequence
  Synthetic oligonucleotide
tgtgttgcaccaaatataggcttctaaata

SEQ ID NO: 509189 - DNA, 30 bp, Artificial Sequence
  Synthetic oligonucleotide
aggtgcaagaaagctactcaacagtaaata

SEQ ID NO: 509190 - DNA, 30 bp, Artificial Sequence
  Synthetic oligonucleotide
gtctgcttattacggtgcctaaggtaaata

SEQ ID NO: 509191 - DNA, 30 bp, Artificial Sequence
  Synthetic oligonucleotide
ctttttggcagtcccctttcagattaaata

SEQ ID NO: 509192 - DNA, 30 bp, Artificial Sequence
  Synthetic oligonucleotide
gcccttatgtcacgtttacgtacttaaata

SEQ ID NO: 509193 - DNA, 30 bp, Artificial Sequence
  Synthetic oligonucleotide
gatctacaggctgagtcctctgtttaaata

SEQ ID NO: 509194 - DNA, 30 bp, Artificial Sequence
  Synthetic oligonucleotide
gtatttgggtgtcggaggaccttttaaata

SEQ ID NO: 509195 - DNA, 30 bp, Artificial Sequence
  Synthetic oligonucleotide
tgttctttagtagctgttagagaaacaata

SEQ ID NO: 509196 - DNA, 30 bp, Artificial Sequence
  Synthetic oligonucleotide
atggaggccatcatggcatcaggaacaata

SEQ ID NO: 509197 - DNA, 30 bp, Artificial Sequence
  Synthetic oligonucleotide
aagggcggcactatagtaatctgaacaata

SEQ ID NO: 509198 - DNA, 30 bp, Artificial Sequence
  Synthetic oligonucleotide
ggtcccggtgggagttggttatatacaata

SEQ ID NO: 509199 - DNA, 30 bp, Artificial Sequence
  Synthetic oligonucleotide
atcttacacctgtcgatctatactacaata

SEQ ID NO: 509200 - DNA, 30 bp, Artificial Sequence
  Synthetic oligonucleotide
cgggtgttccaatggtgagaaggtacaata

SEQ ID NO: 509201 - DNA, 30 bp, Artificial Sequence
  Synthetic oligonucleotide
ccattacctccgcacagcgggcccccaata

SEQ ID NO: 509202 - DNA, 30 bp, Artificial Sequence
  Synthetic oligonucleotide
aggcgctgcatgaaagccgcggccccaata

SEQ ID NO: 509203 - DNA, 30 bp, Artificial Sequence
  Synthetic oligonucleotide
tatggctcagacgtaaggacaaagccaata

SEQ ID NO: 509204 - DNA, 30 bp, Artificial Sequence
  Synthetic oligonucleotide
ccacggccttttgtgtaccatgatccaata

SEQ ID NO: 509205 - DNA, 30 bp, Artificial Sequence
  Synthetic oligonucleotide
cacctttctgctgttccacgtcgtccaata

SEQ ID NO: 509206 - DNA, 30 bp, Artificial Sequence
  Synthetic oligonucleotide
ggcgtataaggcttggcgaagccagcaata

SEQ ID NO: 509207 - DNA, 30 bp, Artificial Sequence
  Synthetic oligonucleotide
gagccacggcagttattagcatgagcaata

SEQ ID NO: 509208 - DNA, 30 bp, Artificial Sequence
  Synthetic oligonucleotide
gggtagggtatcacgcatgacgtagcaata

SEQ ID NO: 509209 - DNA, 30 bp, Artificial Sequence
  Synthetic oligonucleotide
ccagcatatgtaaggtattacgtagcaata

SEQ ID NO: 509210 - DNA, 30 bp, Artificial Sequence
  Synthetic oligonucleotide
atattatattcaaaaagattgttagcaata

SEQ ID NO: 509211 - DNA, 30 bp, Artificial Sequence
  Synthetic oligonucleotide
tagttatgctcccctgaccatatcgcaata

SEQ ID NO: 509212 - DNA, 30 bp, Artificial Sequence
  Synthetic oligonucleotide
gggccagatgctacatggttactcgcaata

SEQ ID NO: 509213 - DNA, 30 bp, Artificial Sequence
  Synthetic oligonucleotide
aagccgagttgggtgtagaatgcggcaata

SEQ ID NO: 509214 - DNA, 30 bp, Artificial Sequence
  Synthetic oligonucleotide
ctgttgctttattgtcgatgattggcaata

SEQ ID NO: 509215 - DNA, 30 bp, Artificial Sequence
  Synthetic oligonucleotide
cgctgtcattgacagacgcttaatgcaata

SEQ ID NO: 509216 - DNA, 30 bp, Artificial Sequence
  Synthetic oligonucleotide
attgttggttcattcggtaaatgtgcaata

SEQ ID NO: 509217 - DNA, 26 bp, Artificial Sequence
  Synthetic oligonucleotide
tgagttcaaggcatcgtttatcaata

SEQ ID NO: 509218 - DNA, 30 bp, Artificial Sequence
  Synthetic oligonucleotide
cagcttcagacattcttgtgtgcctcaata

SEQ ID NO: 509219 - DNA, 30 bp, Artificial Sequence
  Synthetic oligonucleotide
cgggagcattccgtataggcatgctcaata

SEQ ID NO: 509220 - DNA, 30 bp, Artificial Sequence
  Synthetic oligonucleotide
gccaggtaaccagagcgagctcagtcaata

SEQ ID NO: 509221 - DNA, 30 bp, Artificial Sequence
  Synthetic oligonucleotide
ctggttcagaagactacactcgagtcaata

SEQ ID NO: 509222 - DNA, 30 bp, Artificial Sequence
  Synthetic oligonucleotide
cggtgccaaatcacggctgcaagttcaata

SEQ ID NO: 509223 - DNA, 30 bp, Artificial Sequence
  Synthetic oligonucleotide
gttttgtggacgttaatattcatttcaata

SEQ ID NO: 509224 - DNA, 29 bp, Artificial Sequence
  Synthetic oligonucleotide
ttatgtctgccagcatacgtgtaagaata

SEQ ID NO: 509225 - DNA, 30 bp, Artificial Sequence
  Synthetic oligonucleotide
cctcagcgaaccacatcgatgcgcagaata

SEQ ID NO: 509226 - DNA, 30 bp, Artificial Sequence
  Synthetic oligonucleotide
gtcggttacggaatcaagtcaaagagaata

SEQ ID NO: 509227 - DNA, 30 bp, Artificial Sequence
  Synthetic oligonucleotide
acgttccctaacgcgcatttgacgagaata

SEQ ID NO: 509228 - DNA, 30 bp, Artificial Sequence
  Synthetic oligonucleotide
ttgtaactactggagtttgcggtgagaata

SEQ ID NO: 509229 - DNA, 30 bp, Artificial Sequence
  Synthetic oligonucleotide
ctttttccatgtaaattccttgttagaata

SEQ ID NO: 509230 - DNA, 30 bp, Artificial Sequence
  Synthetic oligonucleotide
gcgatgatgacgggttcgcaaacccgaata

SEQ ID NO: 509231 - DNA, 30 bp, Artificial Sequence
  Synthetic oligonucleotide
agcgtttgtacgcgagcagcctctcgaata

SEQ ID NO: 509232 - DNA, 30 bp, Artificial Sequence
  Synthetic oligonucleotide
tgacctgcgcgctcggcactatgtcgaata

SEQ ID NO: 509233 - DNA, 30 bp, Artificial Sequence
  Synthetic oligonucleotide
ggatatgggcccggcaaaggtcttcgaata

SEQ ID NO: 509234 - DNA, 30 bp, Artificial Sequence
  Synthetic oligonucleotide
ggttagagtctatctgcgacctgcggaata

SEQ ID NO: 509235 - DNA, 30 bp, Artificial Sequence
  Synthetic oligonucleotide
gaaattaccaatatatgacgctgcggaata

SEQ ID NO: 509236 - DNA, 30 bp, Artificial Sequence
  Synthetic oligonucleotide
gaccccagtttatttgattcaaagggaata

SEQ ID NO: 509237 - DNA, 30 bp, Artificial Sequence
  Synthetic oligonucleotide
cagatcgttagtgcgtacagaaatggaata

SEQ ID NO: 509238 - DNA, 30 bp, Artificial Sequence
  Synthetic oligonucleotide
ctccacactaagaggaggtgtaatggaata

SEQ ID NO: 509239 - DNA, 30 bp, Artificial Sequence
  Synthetic oligonucleotide
tcaattggttgaaccctgagttatggaata

SEQ ID NO: 509240 - DNA, 30 bp, Artificial Sequence
  Synthetic oligonucleotide
ctggtgattccgcccctccgcagtggaata

SEQ ID NO: 509241 - DNA, 30 bp, Artificial Sequence
  Synthetic oligonucleotide
gggtattcggtgtcggcccggtttggaata

SEQ ID NO: 509242 - DNA, 30 bp, Artificial Sequence
  Synthetic oligonucleotide
acggaacttctgctcatctgtatatgaata

SEQ ID NO: 509243 - DNA, 30 bp, Artificial Sequence
  Synthetic oligonucleotide
gggtacgtcccgggttactatcgctgaata

SEQ ID NO: 509244 - DNA, 30 bp, Artificial Sequence
  Synthetic oligonucleotide
gtacattttgagagatgtgcactctgaata

SEQ ID NO: 509245 - DNA, 30 bp, Artificial Sequence
  Synthetic oligonucleotide
gtacgctttacctctgagtgagagtgaata

SEQ ID NO: 509246 - DNA, 30 bp, Artificial Sequence
  Synthetic oligonucleotide
agccttgcgcaaacaatacctttgtgaata

SEQ ID NO: 509247 - DNA, 30 bp, Artificial Sequence
  Synthetic oligonucleotide
ctatttttacagtgccgtggttaaataata

SEQ ID NO: 509248 - DNA, 30 bp, Artificial Sequence
  Synthetic oligonucleotide
ccaataagcaggcgggtgcagttaataata

SEQ ID NO: 509249 - DNA, 30 bp, Artificial Sequence
  Synthetic oligonucleotide
gttcagagtcgctgacttcgtttaataata

SEQ ID NO: 509250 - DNA, 29 bp, Artificial Sequence
  Synthetic oligonucleotide
tcggctctgaacacttatttttaataata

SEQ ID NO: 509251 - DNA, 30 bp, Artificial Sequence
  Synthetic oligonucleotide
cccaggcagttaggtagcagcaacataata

SEQ ID NO: 509252 - DNA, 30 bp, Artificial Sequence
  Synthetic oligonucleotide
atattccgcttcagtaagatgcacataata

SEQ ID NO: 509253 - DNA, 30 bp, Artificial Sequence
  Synthetic oligonucleotide
atattactgccactcttagacggcataata

SEQ ID NO: 509254 - DNA, 30 bp, Artificial Sequence
  Synthetic oligonucleotide
ggaaacctcttaggcaggcgcatcataata

SEQ ID NO: 509255 - DNA, 30 bp, Artificial Sequence
  Synthetic oligonucleotide
ttcctcgcgcaacattaacagaagataata

SEQ ID NO: 509256 - DNA, 30 bp, Artificial Sequence
  Synthetic oligonucleotide
gaggtagtgttttaaaagcctccgataata

SEQ ID NO: 509257 - DNA, 30 bp, Artificial Sequence
  Synthetic oligonucleotide
taataatgtaactgatccctcaggataata

SEQ ID NO: 509258 - DNA, 30 bp, Artificial Sequence
  Synthetic oligonucleotide
gcagttaatcgccgccccgagaggataata

SEQ ID NO: 509259 - DNA, 30 bp, Artificial Sequence
  Synthetic oligonucleotide
cgatttcccgctccggcatttactataata

SEQ ID NO: 509260 - DNA, 30 bp, Artificial Sequence
  Synthetic oligonucleotide
aacaggtgtggtatgcgatatgttataata

SEQ ID NO: 509261 - DNA, 30 bp, Artificial Sequence
  Synthetic oligonucleotide
caagaagagaaccacctctggaacctaata

SEQ ID NO: 509262 - DNA, 30 bp, Artificial Sequence
  Synthetic oligonucleotide
tatcactcttagctaatggtgcacctaata

SEQ ID NO: 509263 - DNA, 30 bp, Artificial Sequence
  Synthetic oligonucleotide
aaaccagctctgggtgttatggacctaata

SEQ ID NO: 509264 - DNA, 30 bp, Artificial Sequence
  Synthetic oligonucleotide
gggcgcatcttacggatatatagtctaata

SEQ ID NO: 509265 - DNA, 30 bp, Artificial Sequence
  Synthetic oligonucleotide
ctggtcacgcaacactttccacgagtaata

SEQ ID NO: 509266 - DNA, 30 bp, Artificial Sequence
  Synthetic oligonucleotide
tcttgtcctatttacctattactagtaata

SEQ ID NO: 509267 - DNA, 30 bp, Artificial Sequence
  Synthetic oligonucleotide
attttcgaggcggattaatagttagtaata

SEQ ID NO: 509268 - DNA, 30 bp, Artificial Sequence
  Synthetic oligonucleotide
atatgttaggttcctttggcaatcgtaata

SEQ ID NO: 509269 - DNA, 30 bp, Artificial Sequence
  Synthetic oligonucleotide
ttgatattgctgtgctggagggtcgtaata

SEQ ID NO: 509270 - DNA, 30 bp, Artificial Sequence
  Synthetic oligonucleotide
ccacgcatacacccacgcgagcaggtaata

SEQ ID NO: 509271 - DNA, 30 bp, Artificial Sequence
  Synthetic oligonucleotide
ggaatttttttttgtaaactggaggtaata

SEQ ID NO: 509272 - DNA, 30 bp, Artificial Sequence
  Synthetic oligonucleotide
gccggagggattacccttctgagggtaata

SEQ ID NO: 509273 - DNA, 30 bp, Artificial Sequence
  Synthetic oligonucleotide
gaggcaaagagacgatgcaatagggtaata

SEQ ID NO: 509274 - DNA, 30 bp, Artificial Sequence
  Synthetic oligonucleotide
tagagtacttcagccttagctgaattaata

SEQ ID NO: 509275 - DNA, 30 bp, Artificial Sequence
  Synthetic oligonucleotide
atctcccgtctaccattttctcacttaata

SEQ ID NO: 509276 - DNA, 30 bp, Artificial Sequence
  Synthetic oligonucleotide
gtcgagctttgctcgtcgtgctccttaata

SEQ ID NO: 509277 - DNA, 30 bp, Artificial Sequence
  Synthetic oligonucleotide
tggtcgtaactgtcaaccttcctcttaata

SEQ ID NO: 509278 - DNA, 30 bp, Artificial Sequence
  Synthetic oligonucleotide
aaatacaagtttctccactgcccgttaata

SEQ ID NO: 509279 - DNA, 30 bp, Artificial Sequence
  Synthetic oligonucleotide
ggtatagtacttcgtaatgcgatgttaata

SEQ ID NO: 509280 - DNA, 30 bp, Artificial Sequence
  Synthetic oligonucleotide
gtgaatgttagcttgtaaacgtaaaacata

SEQ ID NO: 509281 - DNA, 30 bp, Artificial Sequence
  Synthetic oligonucleotide
tattcagtttcaaatatctatcgaaacata

SEQ ID NO: 509282 - DNA, 30 bp, Artificial Sequence
  Synthetic oligonucleotide
tattttacctacccaatcagtcgaaacata

SEQ ID NO: 509283 - DNA, 30 bp, Artificial Sequence
  Synthetic oligonucleotide
tatgatactatgtgctttgtttacaacata

SEQ ID NO: 509284 - DNA, 30 bp, Artificial Sequence
  Synthetic oligonucleotide
ggcagggagggaaaatcggataagaacata

SEQ ID NO: 509285 - DNA, 30 bp, Artificial Sequence
  Synthetic oligonucleotide
tgacgatgttagagaaaatttgagaacata

SEQ ID NO: 509286 - DNA, 30 bp, Artificial Sequence
  Synthetic oligonucleotide
ctgacagacttttattaaaggatgaacata

SEQ ID NO: 509287 - DNA, 30 bp, Artificial Sequence
  Synthetic oligonucleotide
gtccagttgccgcgctgagttatgaacata

SEQ ID NO: 509288 - DNA, 30 bp, Artificial Sequence
  Synthetic oligonucleotide
gacacccgcgcaaacgcacgggtgaacata

SEQ ID NO: 509289 - DNA, 30 bp, Artificial Sequence
  Synthetic oligonucleotide
gttaggtctcgggttaacgcgcataacata

SEQ ID NO: 509290 - DNA, 30 bp, Artificial Sequence
  Synthetic oligonucleotide
cgggcctcttgcctactatttcataacata

SEQ ID NO: 509291 - DNA, 30 bp, Artificial Sequence
  Synthetic oligonucleotide
gtacgtaacgtcgcatcacttattaacata

SEQ ID NO: 509292 - DNA, 30 bp, Artificial Sequence
  Synthetic oligonucleotide
tacgtctttacgaaatggctggttaacata

SEQ ID NO: 509293 - DNA, 30 bp, Artificial Sequence
  Synthetic oligonucleotide
gattgcgctagcatctccggaaaccacata

SEQ ID NO: 509294 - DNA, 30 bp, Artificial Sequence
  Synthetic oligonucleotide
aagagaatgctgcgacgccagcagcacata

SEQ ID NO: 509295 - DNA, 30 bp, Artificial Sequence
  Synthetic oligonucleotide
aatgtatgtgtatgatgcccaaatcacata

SEQ ID NO: 509296 - DNA, 30 bp, Artificial Sequence
  Synthetic oligonucleotide
actcccttagaagtgttagacaaagacata

SEQ ID NO: 509297 - DNA, 30 bp, Artificial Sequence
  Synthetic oligonucleotide
gaataatagttaagaattgtatcagacata

SEQ ID NO: 509298 - DNA, 30 bp, Artificial Sequence
  Synthetic oligonucleotide
attgtctcgcccccaataggcagcgacata

SEQ ID NO: 509299 - DNA, 30 bp, Artificial Sequence
  Synthetic oligonucleotide
ccaggattttagatgcagccagcggacata

SEQ ID NO: 509300 - DNA, 30 bp, Artificial Sequence
  Synthetic oligonucleotide
gctgcaggggcatggaacggaaatgacata

SEQ ID NO: 509301 - DNA, 30 bp, Artificial Sequence
  Synthetic oligonucleotide
ctgaactggtgacgcgaaaaacttgacata

SEQ ID NO: 509302 - DNA, 30 bp, Artificial Sequence
  Synthetic oligonucleotide
tgcaatatttgtacagtgcctaaatacata

SEQ ID NO: 509303 - DNA, 30 bp, Artificial Sequence
  Synthetic oligonucleotide
gcgcaataaatgtggtggtagtcatacata

SEQ ID NO: 509304 - DNA, 30 bp, Artificial Sequence
  Synthetic oligonucleotide
ggggactgcatctcaatgaattcatacata

SEQ ID NO: 509305 - DNA, 30 bp, Artificial Sequence
  Synthetic oligonucleotide
ttaccttgttcccccgcgcttcactacata

SEQ ID NO: 509306 - DNA, 30 bp, Artificial Sequence
  Synthetic oligonucleotide
ctattttctcctgatttatgtccctacata

SEQ ID NO: 509307 - DNA, 30 bp, Artificial Sequence
  Synthetic oligonucleotide
tttcggtttagtactcatcggatctacata

SEQ ID NO: 509308 - DNA, 30 bp, Artificial Sequence
  Synthetic oligonucleotide
acgcatattcgttgactttccaattacata

SEQ ID NO: 509309 - DNA, 30 bp, Artificial Sequence
  Synthetic oligonucleotide
aagacgcccagtccgcaaattgattacata

SEQ ID NO: 509310 - DNA, 30 bp, Artificial Sequence
  Synthetic oligonucleotide
ggctatcggggcgtatgaaccggttacata

SEQ ID NO: 509311 - DNA, 30 bp, Artificial Sequence
  Synthetic oligonucleotide
tttcccgtctctaaactagctgtttacata

SEQ ID NO: 509312 - DNA, 30 bp, Artificial Sequence
  Synthetic oligonucleotide
gagcacctcacggagcaaccataaaccata

SEQ ID NO: 509313 - DNA, 30 bp, Artificial Sequence
  Synthetic oligonucleotide
gactcatagttgtcatttaagccaaccata

SEQ ID NO: 509314 - DNA, 31 bp, Artificial Sequence
  Synthetic oligonucleotide
ttcaaaaggtccctgtcgtgcgaacaccata

SEQ ID NO: 509315 - DNA, 30 bp, Artificial Sequence
  Synthetic oligonucleotide
cgtcattatcaaggtacctacgccaccata

SEQ ID NO: 509316 - DNA, 30 bp, Artificial Sequence
  Synthetic oligonucleotide
atcaggggtacgcaatgcttccgtaccata

SEQ ID NO: 509317 - DNA, 30 bp, Artificial Sequence
  Synthetic oligonucleotide
agttatgatagttgtcttcaaagacccata

SEQ ID NO: 509318 - DNA, 30 bp, Artificial Sequence
  Synthetic oligonucleotide
ggtttgagctctatggacaagacccccata

SEQ ID NO: 509319 - DNA, 30 bp, Artificial Sequence
  Synthetic oligonucleotide
gtgcgggatatggtgaccggcgtccccata

SEQ ID NO: 509320 - DNA, 30 bp, Artificial Sequence
  Synthetic oligonucleotide
ttcgcgtgctcgctatggccccagcccata

SEQ ID NO: 509321 - DNA, 30 bp, Artificial Sequence
  Synthetic oligonucleotide
aacggcagctaatggtcataatggcccata

SEQ ID NO: 509322 - DNA, 30 bp, Artificial Sequence
  Synthetic oligonucleotide
atcaaagttactttgcgcgttcccgccata

SEQ ID NO: 509323 - DNA, 30 bp, Artificial Sequence
  Synthetic oligonucleotide
cattctcttacgtggggaaacggcgccata

SEQ ID NO: 509324 - DNA, 30 bp, Artificial Sequence
  Synthetic oligonucleotide
aagactcatttggtcgtgtacgtcgccata

SEQ ID NO: 509325 - DNA, 30 bp, Artificial Sequence
  Synthetic oligonucleotide
tctccgcaagcggtattgtatgcggccata

SEQ ID NO: 509326 - DNA, 30 bp, Artificial Sequence
  Synthetic oligonucleotide
agtctatcatgcataggtgggagggccata

SEQ ID NO: 509327 - DNA, 30 bp, Artificial Sequence
  Synthetic oligonucleotide
tattgcaattgaccatgaggtctggccata

SEQ ID NO: 509328 - DNA, 30 bp, Artificial Sequence
  Synthetic oligonucleotide
taaacgctctatcggtaagggagtgccata

SEQ ID NO: 509329 - DNA, 30 bp, Artificial Sequence
  Synthetic oligonucleotide
gaataggggaggcagcagccttgatccata

SEQ ID NO: 509330 - DNA, 30 bp, Artificial Sequence
  Synthetic oligonucleotide
ctactgagtagaaaccggggcttatccata

SEQ ID NO: 509331 - DNA, 30 bp, Artificial Sequence
  Synthetic oligonucleotide
agcgctgctggctgaacccccggctccata

SEQ ID NO: 509332 - DNA, 30 bp, Artificial Sequence
  Synthetic oligonucleotide
agtattcatgtatgaagtttattctccata

SEQ ID NO: 509333 - DNA, 30 bp, Artificial Sequence
  Synthetic oligonucleotide
gggcatttttatcagggcctaaagtccata

SEQ ID NO: 509334 - DNA, 30 bp, Artificial Sequence
  Synthetic oligonucleotide
agtagcttaagctaggcgttgacgtccata

SEQ ID NO: 509335 - DNA, 30 bp, Artificial Sequence
  Synthetic oligonucleotide
tatggtcttggactacaaggctggtccata

SEQ ID NO: 509336 - DNA, 30 bp, Artificial Sequence
  Synthetic oligonucleotide
tttctgactcgaatcaccgggttttccata

SEQ ID NO: 509337 - DNA, 30 bp, Artificial Sequence
  Synthetic oligonucleotide
acgtacatatgcagcgtggctgtaagcata

SEQ ID NO: 509338 - DNA, 30 bp, Artificial Sequence
  Synthetic oligonucleotide
caattcgcaacaaagttgtggtccagcata

SEQ ID NO: 509339 - DNA, 30 bp, Artificial Sequence
  Synthetic oligonucleotide
ttaaaactgtgaaaattccgatcgagcata

SEQ ID NO: 509340 - DNA, 30 bp, Artificial Sequence
  Synthetic oligonucleotide
tcgactattacctgtgatacacggagcata

SEQ ID NO: 509341 - DNA, 30 bp, Artificial Sequence
  Synthetic oligonucleotide
cagaggcgagtgcggcaatttgctagcata

SEQ ID NO: 509342 - DNA, 30 bp, Artificial Sequence
  Synthetic oligonucleotide
taacagatccttctgggtccaagacgcata

SEQ ID NO: 509343 - DNA, 30 bp, Artificial Sequence
  Synthetic oligonucleotide
tagctgttgctggaaatgatttgacgcata

SEQ ID NO: 509344 - DNA, 30 bp, Artificial Sequence
  Synthetic oligonucleotide
ccgtctactgcgttgtattgcgcccgcata

SEQ ID NO: 509345 - DNA, 30 bp, Artificial Sequence
  Synthetic oligonucleotide
aaattcgctccagtcgtctaccgccgcata

SEQ ID NO: 509346 - DNA, 30 bp, Artificial Sequence
  Synthetic oligonucleotide
attggtcagctctggagcaggtatcgcata

SEQ ID NO: 509347 - DNA, 30 bp, Artificial Sequence
  Synthetic oligonucleotide
tgcccttctaacatgttctcacctcgcata

SEQ ID NO: 509348 - DNA, 30 bp, Artificial Sequence
  Synthetic oligonucleotide
tgcactgctttacattgcgagtcaggcata

SEQ ID NO: 509349 - DNA, 30 bp, Artificial Sequence
  Synthetic oligonucleotide
actaattgaggctctagctgactaggcata

SEQ ID NO: 509350 - DNA, 30 bp, Artificial Sequence
  Synthetic oligonucleotide
gtttatattcctgtctattcgcgcggcata

SEQ ID NO: 509351 - DNA, 30 bp, Artificial Sequence
  Synthetic oligonucleotide
ttggtagtagcgcgcgcatgaggcggcata

SEQ ID NO: 509352 - DNA, 30 bp, Artificial Sequence
  Synthetic oligonucleotide
atcttcaggaaatcggtttcaaagggcata

SEQ ID NO: 509353 - DNA, 30 bp, Artificial Sequence
  Synthetic oligonucleotide
tagaagatggttctaaacaggacgggcata

SEQ ID NO: 509354 - DNA, 30 bp, Artificial Sequence
  Synthetic oligonucleotide
gacaattaatgccctgaatgtactggcata

SEQ ID NO: 509355 - DNA, 30 bp, Artificial Sequence
  Synthetic oligonucleotide
ttccagtcatattggtgttgcattggcata

SEQ ID NO: 509356 - DNA, 30 bp, Artificial Sequence
  Synthetic oligonucleotide
gacgagtaccgcgcgcctgcttgctgcata

SEQ ID NO: 509357 - DNA, 29 bp, Artificial Sequence
  Synthetic oligonucleotide
gcggggggggaggacggacaatctgcata

SEQ ID NO: 509358 - DNA, 30 bp, Artificial Sequence
  Synthetic oligonucleotide
ttttggcaatacattgatacgtagtgcata

SEQ ID NO: 509359 - DNA, 30 bp, Artificial Sequence
  Synthetic oligonucleotide
ggacgctttgcgcagccgtgcgtttgcata

SEQ ID NO: 509360 - DNA, 30 bp, Artificial Sequence
  Synthetic oligonucleotide
gccagttgtcattgccctggcccaatcata

SEQ ID NO: 509361 - DNA, 30 bp, Artificial Sequence
  Synthetic oligonucleotide
gaatataaccaggatgcgtctggaatcata

SEQ ID NO: 509362 - DNA, 30 bp, Artificial Sequence
  Synthetic oligonucleotide
caattttggttggccaggtggcccatcata

SEQ ID NO: 509363 - DNA, 30 bp, Artificial Sequence
  Synthetic oligonucleotide
gttgatggaatttattaacttggcatcata

SEQ ID NO: 509364 - DNA, 31 bp, Artificial Sequence
  Synthetic oligonucleotide
ggaagaatcagtctgactgtttctgatcata

SEQ ID NO: 509365 - DNA, 30 bp, Artificial Sequence
  Synthetic oligonucleotide
tgcgaatcccagattccatggattatcata

SEQ ID NO: 509366 - DNA, 30 bp, Artificial Sequence
  Synthetic oligonucleotide
tatttcttcatctgtagctcgcagctcata

SEQ ID NO: 509367 - DNA, 30 bp, Artificial Sequence
  Synthetic oligonucleotide
ggctttgaacgcacagtacacgagctcata

SEQ ID NO: 509368 - DNA, 30 bp, Artificial Sequence
  Synthetic oligonucleotide
gagttgccgcgtataaacgcactgctcata

SEQ ID NO: 509369 - DNA, 30 bp, Artificial Sequence
  Synthetic oligonucleotide
tttttaccgactaactacacctttctcata

SEQ ID NO: 509370 - DNA, 30 bp, Artificial Sequence
  Synthetic oligonucleotide
gaagcattgtgtcaatccgctccagtcata

SEQ ID NO: 509371 - DNA, 30 bp, Artificial Sequence
  Synthetic oligonucleotide
cccgccaagatattgacgaatgacgtcata

SEQ ID NO: 509372 - DNA, 30 bp, Artificial Sequence
  Synthetic oligonucleotide
gatcgcagcgtttgtatgtcgctcgtcata

SEQ ID NO: 509373 - DNA, 30 bp, Artificial Sequence
  Synthetic oligonucleotide
cacgcaataatgacagctaaggtcgtcata

SEQ ID NO: 509374 - DNA, 30 bp, Artificial Sequence
  Synthetic oligonucleotide
gacccggccgcttaatgtcatttggtcata

SEQ ID NO: 509375 - DNA, 30 bp, Artificial Sequence
  Synthetic oligonucleotide
ttgcagcaattaggtggacattctgtcata

SEQ ID NO: 509376 - DNA, 30 bp, Artificial Sequence
  Synthetic oligonucleotide
ttatggaagggcgtgttctggccattcata

SEQ ID NO: 509377 - DNA, 28 bp, Artificial Sequence
  Synthetic oligonucleotide
actggagagcatggtcataggcttcata

SEQ ID NO: 509378 - DNA, 30 bp, Artificial Sequence
  Synthetic oligonucleotide
tgttttgacggacttgggaaagtcttcata

SEQ ID NO: 509379 - DNA, 30 bp, Artificial Sequence
  Synthetic oligonucleotide
aagattttagttttgatcctcgagttcata

SEQ ID NO: 509380 - DNA, 30 bp, Artificial Sequence
  Synthetic oligonucleotide
ctgcgcgcagaaattgatagaaatttcata

SEQ ID NO: 509381 - DNA, 30 bp, Artificial Sequence
  Synthetic oligonucleotide
gttactcgctgggcaatcggatatttcata

SEQ ID NO: 509382 - DNA, 30 bp, Artificial Sequence
  Synthetic oligonucleotide
cgaccaaccctcatgttttagtctttcata

SEQ ID NO: 509383 - DNA, 30 bp, Artificial Sequence
  Synthetic oligonucleotide
agggagtagtgatcatgtcattttttcata

SEQ ID NO: 509384 - DNA, 30 bp, Artificial Sequence
  Synthetic oligonucleotide
tgtataccttacaacagtgtggaaaagata

SEQ ID NO: 509385 - DNA, 30 bp, Artificial Sequence
  Synthetic oligonucleotide
ccaccatatcaggggcccttgctaaagata

SEQ ID NO: 509386 - DNA, 30 bp, Artificial Sequence
  Synthetic oligonucleotide
ccattagtggacaagctacctttaaagata

SEQ ID NO: 509387 - DNA, 30 bp, Artificial Sequence
  Synthetic oligonucleotide
gtggtccaaatttcaagacgtcccaagata

SEQ ID NO: 509388 - DNA, 30 bp, Artificial Sequence
  Synthetic oligonucleotide
accaccccattccgcggggttatcaagata

SEQ ID NO: 509389 - DNA, 30 bp, Artificial Sequence
  Synthetic oligonucleotide
gacccaacgatgaatagattcagacagata

SEQ ID NO: 509390 - DNA, 30 bp, Artificial Sequence
  Synthetic oligonucleotide
cgacgaagggtaaaccgggaccgccagata

SEQ ID NO: 509391 - DNA, 30 bp, Artificial Sequence
  Synthetic oligonucleotide
aggctatacacaaagagtcttgagcagata

SEQ ID NO: 509392 - DNA, 30 bp, Artificial Sequence
  Synthetic oligonucleotide
aagccgtatgaagcattcatggctcagata

SEQ ID NO: 509393 - DNA, 29 bp, Artificial Sequence
  Synthetic oligonucleotide
ttcgattttggcatttggtggctcagata

SEQ ID NO: 509394 - DNA, 30 bp, Artificial Sequence
  Synthetic oligonucleotide
tatctccgagggcactttgcaccagagata

SEQ ID NO: 509395 - DNA, 30 bp, Artificial Sequence
  Synthetic oligonucleotide
atgtttacgagtgcccgagggcgagagata

SEQ ID NO: 509396 - DNA, 30 bp, Artificial Sequence
  Synthetic oligonucleotide
gcagcacatgctagaaggtccgtcgagata

SEQ ID NO: 509397 - DNA, 30 bp, Artificial Sequence
  Synthetic oligonucleotide
ctggatatttcattggtattaatggagata

SEQ ID NO: 509398 - DNA, 30 bp, Artificial Sequence
  Synthetic oligonucleotide
ccgatactcccttgagtctttggtgagata

SEQ ID NO: 509399 - DNA, 30 bp, Artificial Sequence
  Synthetic oligonucleotide
gcattgttctattgtgtctcctttgagata

SEQ ID NO: 509400 - DNA, 30 bp, Artificial Sequence
  Synthetic oligonucleotide
tgtacgcgaccctctattcaccaatagata

SEQ ID NO: 509401 - DNA, 30 bp, Artificial Sequence
  Synthetic oligonucleotide
tgacttgggcgtagatatcttcaatagata

SEQ ID NO: 509402 - DNA, 30 bp, Artificial Sequence
  Synthetic oligonucleotide
tagcggagaggaaaggataatgaatagata

SEQ ID NO: 509403 - DNA, 30 bp, Artificial Sequence
  Synthetic oligonucleotide
ggggaagagtcgtgtgtcaagggatagata

SEQ ID NO: 509404 - DNA, 31 bp, Artificial Sequence
  Synthetic oligonucleotide
ctgatggccatttcaatcatatggatagata

SEQ ID NO: 509405 - DNA, 30 bp, Artificial Sequence
  Synthetic oligonucleotide
accgtaaggggtttttgggtagcctagata

SEQ ID NO: 509406 - DNA, 31 bp, Artificial Sequence
  Synthetic oligonucleotide
gctaggcgaaccacgaacgggaatctagata

SEQ ID NO: 509407 - DNA, 30 bp, Artificial Sequence
  Synthetic oligonucleotide
atcccgcacccgactgattcgtcgtagata

SEQ ID NO: 509408 - DNA, 30 bp, Artificial Sequence
  Synthetic oligonucleotide
tcgcctaataaatgacccttcatttagata

SEQ ID NO: 509409 - DNA, 30 bp, Artificial Sequence
  Synthetic oligonucleotide
gtccgaaaagcctcgaaggggatttagata

SEQ ID NO: 509410 - DNA, 30 bp, Artificial Sequence
  Synthetic oligonucleotide
cagaatgtcagaggacaatggaaaacgata

SEQ ID NO: 509411 - DNA, 30 bp, Artificial Sequence
  Synthetic oligonucleotide
cacagagaaataaccatgcaagaaacgata

SEQ ID NO: 509412 - DNA, 30 bp, Artificial Sequence
  Synthetic oligonucleotide
aaataagttcagcctgggtcgcagacgata

SEQ ID NO: 509413 - DNA, 30 bp, Artificial Sequence
  Synthetic oligonucleotide
acatcaggatagggattcagaccgacgata

SEQ ID NO: 509414 - DNA, 30 bp, Artificial Sequence
  Synthetic oligonucleotide
ttgtaagaatgtaggcgacgtcatacgata

SEQ ID NO: 509415 - DNA, 30 bp, Artificial Sequence
  Synthetic oligonucleotide
agaatagccggtcatgataaagctacgata

SEQ ID NO: 509416 - DNA, 30 bp, Artificial Sequence
  Synthetic oligonucleotide
tacattattcagcagaagttacgaccgata

SEQ ID NO: 509417 - DNA, 30 bp, Artificial Sequence
  Synthetic oligonucleotide
tttcactattgtctcacccaggagccgata

SEQ ID NO: 509418 - DNA, 30 bp, Artificial Sequence
  Synthetic oligonucleotide
gtagtaagctttttgtcgtgatggccgata

SEQ ID NO: 509419 - DNA, 30 bp, Artificial Sequence
  Synthetic oligonucleotide
aagccctgagactcttgatagcatccgata

SEQ ID NO: 509420 - DNA, 30 bp, Artificial Sequence
  Synthetic oligonucleotide
cagaatgcggatacgctgacttctccgata

SEQ ID NO: 509421 - DNA, 30 bp, Artificial Sequence
  Synthetic oligonucleotide
ttaaacctaggtgcatagcgctaagcgata

SEQ ID NO: 509422 - DNA, 30 bp, Artificial Sequence
  Synthetic oligonucleotide
cacgagggtctaccaagtattgcagcgata

SEQ ID NO: 509423 - DNA, 30 bp, Artificial Sequence
  Synthetic oligonucleotide
ggcatatcaacttttatcccagacgcgata

SEQ ID NO: 509424 - DNA, 30 bp, Artificial Sequence
  Synthetic oligonucleotide
cctcagcggcgatggtgataggccgcgata

SEQ ID NO: 509425 - DNA, 30 bp, Artificial Sequence
  Synthetic oligonucleotide
aggacaagcacatctcttctcgaatcgata

SEQ ID NO: 509426 - DNA, 30 bp, Artificial Sequence
  Synthetic oligonucleotide
ggatgcaggtaacgaatgcatacatcgata

SEQ ID NO: 509427 - DNA, 30 bp, Artificial Sequence
  Synthetic oligonucleotide
gctctagaaccccctgttccttcatcgata

SEQ ID NO: 509428 - DNA, 30 bp, Artificial Sequence
  Synthetic oligonucleotide
aaaaagacatttattctctttatatcgata

SEQ ID NO: 509429 - DNA, 30 bp, Artificial Sequence
  Synthetic oligonucleotide
aaatgacacagctggcttcagccctcgata

SEQ ID NO: 509430 - DNA, 30 bp, Artificial Sequence
  Synthetic oligonucleotide
ccccgaagtttgggacacgcttgctcgata

SEQ ID NO: 509431 - DNA, 30 bp, Artificial Sequence
  Synthetic oligonucleotide
taaacttgtccggcccaaaccgtctcgata

SEQ ID NO: 509432 - DNA, 30 bp, Artificial Sequence
  Synthetic oligonucleotide
cgtgaagtgaatcctggagatgagtcgata

SEQ ID NO: 509433 - DNA, 30 bp, Artificial Sequence
  Synthetic oligonucleotide
aagtcgcagtagtgctaatcaaggtcgata

SEQ ID NO: 509434 - DNA, 30 bp, Artificial Sequence
  Synthetic oligonucleotide
ttcaatctcaacgccgtagtatcttcgata

SEQ ID NO: 509435 - DNA, 30 bp, Artificial Sequence
  Synthetic oligonucleotide
tcactgaggaagcatatgatacaaaggata

SEQ ID NO: 509436 - DNA, 30 bp, Artificial Sequence
  Synthetic oligonucleotide
ctgcaaatgtcgcaactgcaaataaggata

SEQ ID NO: 509437 - DNA, 30 bp, Artificial Sequence
  Synthetic oligonucleotide
tcgttttgccaactaataagggtgaggata

SEQ ID NO: 509438 - DNA, 30 bp, Artificial Sequence
  Synthetic oligonucleotide
aattggggcatagacgagagtactaggata

SEQ ID NO: 509439 - DNA, 30 bp, Artificial Sequence
  Synthetic oligonucleotide
gttcatggattacgcatttgctttaggata

SEQ ID NO: 509440 - DNA, 30 bp, Artificial Sequence
  Synthetic oligonucleotide
gagggtccagcagtgcgaaacaaacggata

SEQ ID NO: 509441 - DNA, 30 bp, Artificial Sequence
  Synthetic oligonucleotide
cgggagtctacaggaatcggccaacggata

SEQ ID NO: 509442 - DNA, 30 bp, Artificial Sequence
  Synthetic oligonucleotide
gacgggcgtcgcagatttgcccgacggata

SEQ ID NO: 509443 - DNA, 30 bp, Artificial Sequence
  Synthetic oligonucleotide
agaaaaaggtttcactccattacgcggata

SEQ ID NO: 509444 - DNA, 30 bp, Artificial Sequence
  Synthetic oligonucleotide
ggctgctgaggcgatcttcacgtgcggata

SEQ ID NO: 509445 - DNA, 30 bp, Artificial Sequence
  Synthetic oligonucleotide
gagagagccaggttgagggcctttcggata

SEQ ID NO: 509446 - DNA, 30 bp, Artificial Sequence
  Synthetic oligonucleotide
atgccgctggcagaatcccagaaagggata

SEQ ID NO: 509447 - DNA, 30 bp, Artificial Sequence
  Synthetic oligonucleotide
agcagagggtggtggactcttcaggggata

SEQ ID NO: 509448 - DNA, 30 bp, Artificial Sequence
  Synthetic oligonucleotide
tgcaatctgccataagatggcacggggata

SEQ ID NO: 509449 - DNA, 30 bp, Artificial Sequence
  Synthetic oligonucleotide
atcacaggtccagactcttttccggggata

SEQ ID NO: 509450 - DNA, 30 bp, Artificial Sequence
  Synthetic oligonucleotide
tggccgcagtgcacccatattcgggggata

SEQ ID NO: 509451 - DNA, 30 bp, Artificial Sequence
  Synthetic oligonucleotide
tatttcaatgctttaacaacgtgggggata

SEQ ID NO: 509452 - DNA, 30 bp, Artificial Sequence
  Synthetic oligonucleotide
gttacgacggcaccacaccactgtgggata

SEQ ID NO: 509453 - DNA, 30 bp, Artificial Sequence
  Synthetic oligonucleotide
cataacgacgctgtaaacgcctcatggata

SEQ ID NO: 509454 - DNA, 30 bp, Artificial Sequence
  Synthetic oligonucleotide
gcagtaccctcttgccatcttcgatggata

SEQ ID NO: 509455 - DNA, 30 bp, Artificial Sequence
  Synthetic oligonucleotide
ttatctggtcctactggatattcctggata

SEQ ID NO: 509456 - DNA, 30 bp, Artificial Sequence
  Synthetic oligonucleotide
tgcagcagggagcctacggcacgctggata

SEQ ID NO: 509457 - DNA, 30 bp, Artificial Sequence
  Synthetic oligonucleotide
gtcaatgattggcatccgaatttctggata

SEQ ID NO: 509458 - DNA, 30 bp, Artificial Sequence
  Synthetic oligonucleotide
aacacagcgttgggtcataagtagtggata

SEQ ID NO: 509459 - DNA, 30 bp, Artificial Sequence
  Synthetic oligonucleotide
atagcaatagatttttcaccacggtggata

SEQ ID NO: 509460 - DNA, 30 bp, Artificial Sequence
  Synthetic oligonucleotide
aacgctaagcacagggtgcagttttggata

SEQ ID NO: 509461 - DNA, 30 bp, Artificial Sequence
  Synthetic oligonucleotide
tatgaatgttcgtattgtaaaaagatgata

SEQ ID NO: 509462 - DNA, 30 bp, Artificial Sequence
  Synthetic oligonucleotide
cccttcattcggagtcgttcgtagatgata

SEQ ID NO: 509463 - DNA, 30 bp, Artificial Sequence
  Synthetic oligonucleotide
cagccctctggttcacccttacctatgata

SEQ ID NO: 509464 - DNA, 30 bp, Artificial Sequence
  Synthetic oligonucleotide
atggttggctatggggagttagacctgata

SEQ ID NO: 509465 - DNA, 30 bp, Artificial Sequence
  Synthetic oligonucleotide
agagcgctcgcctatcgttataccctgata

SEQ ID NO: 509466 - DNA, 30 bp, Artificial Sequence
  Synthetic oligonucleotide
tttcttgggatgtatcaatgacccctgata

SEQ ID NO: 509467 - DNA, 30 bp, Artificial Sequence
  Synthetic oligonucleotide
cttccgtatccttggactgctcgcctgata

SEQ ID NO: 509468 - DNA, 30 bp, Artificial Sequence
  Synthetic oligonucleotide
tagtgtatacaagcagcattatcgctgata

SEQ ID NO: 509469 - DNA, 30 bp, Artificial Sequence
  Synthetic oligonucleotide
tcccttaattcgcaccttcccgctctgata

SEQ ID NO: 509470 - DNA, 30 bp, Artificial Sequence
  Synthetic oligonucleotide
tctgtcgcgccggggaatcccggtctgata

SEQ ID NO: 509471 - DNA, 30 bp, Artificial Sequence
  Synthetic oligonucleotide
gataagcatttctacaactgacaagtgata

SEQ ID NO: 509472 - DNA, 30 bp, Artificial Sequence
  Synthetic oligonucleotide
gtttacgccgctggctgcgcatcagtgata

SEQ ID NO: 509473 - DNA, 30 bp, Artificial Sequence
  Synthetic oligonucleotide
taaagtcaccgtatagtcattggagtgata

SEQ ID NO: 509474 - DNA, 30 bp, Artificial Sequence
  Synthetic oligonucleotide
agtcactaccgttctagttaagacgtgata

SEQ ID NO: 509475 - DNA, 30 bp, Artificial Sequence
  Synthetic oligonucleotide
ctggtggctaggaacagcgtgattgtgata

SEQ ID NO: 509476 - DNA, 30 bp, Artificial Sequence
  Synthetic oligonucleotide
tgtatggatgggttaaagaatgcgttgata

SEQ ID NO: 509477 - DNA, 30 bp, Artificial Sequence
  Synthetic oligonucleotide
cacaaccactcaaaatgcagccggttgata

SEQ ID NO: 509478 - DNA, 30 bp, Artificial Sequence
  Synthetic oligonucleotide
ggccggccgtaattgctacattttttgata

SEQ ID NO: 509479 - DNA, 25 bp, Artificial Sequence
  Synthetic oligonucleotide
tgctatttaccttgtcttaaatata

SEQ ID NO: 509480 - DNA, 30 bp, Artificial Sequence
  Synthetic oligonucleotide
gatcagctaaagttagttgacgacaatata

SEQ ID NO: 509481 - DNA, 30 bp, Artificial Sequence
  Synthetic oligonucleotide
gtacgcgacccccattcctttgacaatata

SEQ ID NO: 509482 - DNA, 30 bp, Artificial Sequence
  Synthetic oligonucleotide
gtccctgctaccggattacatatcaatata

SEQ ID NO: 509483 - DNA, 30 bp, Artificial Sequence
  Synthetic oligonucleotide
gacaggtagaactgctatttgcagaatata

SEQ ID NO: 509484 - DNA, 30 bp, Artificial Sequence
  Synthetic oligonucleotide
gggccaagacattctcgttctgagaatata

SEQ ID NO: 509485 - DNA, 30 bp, Artificial Sequence
  Synthetic oligonucleotide
cggaccaattttcgtttgaacaataatata

SEQ ID NO: 509486 - DNA, 30 bp, Artificial Sequence
  Synthetic oligonucleotide
gtatcacggcgcgctagaaataataatata

SEQ ID NO: 509487 - DNA, 30 bp, Artificial Sequence
  Synthetic oligonucleotide
tcacggtcggctgtataattagataatata

SEQ ID NO: 509488 - DNA, 30 bp, Artificial Sequence
  Synthetic oligonucleotide
gttcgctcgttctgataacactataatata

SEQ ID NO: 509489 - DNA, 30 bp, Artificial Sequence
  Synthetic oligonucleotide
aaggtattatgcccgcggcgttctaatata

SEQ ID NO: 509490 - DNA, 30 bp, Artificial Sequence
  Synthetic oligonucleotide
agatatcaagtctgatctaagggccatata

SEQ ID NO: 509491 - DNA, 30 bp, Artificial Sequence
  Synthetic oligonucleotide
aggtcatacccttgaccacagtagcatata

SEQ ID NO: 509492 - DNA, 30 bp, Artificial Sequence
  Synthetic oligonucleotide
ggtttgtacaacttgtttacgtagcatata

SEQ ID NO: 509493 - DNA, 30 bp, Artificial Sequence
  Synthetic oligonucleotide
taagttcacacatatatattggcgcatata

SEQ ID NO: 509494 - DNA, 30 bp, Artificial Sequence
  Synthetic oligonucleotide
tgccctcctatgccactatcttggcatata

SEQ ID NO: 509495 - DNA, 30 bp, Artificial Sequence
  Synthetic oligonucleotide
atttaacattatgataattacgtgcatata

SEQ ID NO: 509496 - DNA, 30 bp, Artificial Sequence
  Synthetic oligonucleotide
agcagtcacatacccgctgcaaatcatata

SEQ ID NO: 509497 - DNA, 30 bp, Artificial Sequence
  Synthetic oligonucleotide
cggaagacatatgcctatggcgatcatata

SEQ ID NO: 509498 - DNA, 30 bp, Artificial Sequence
  Synthetic oligonucleotide
tgtgcctagacgcccggacgccaagatata

SEQ ID NO: 509499 - DNA, 30 bp, Artificial Sequence
  Synthetic oligonucleotide
gcacttattagaagttctttggcagatata

SEQ ID NO: 509500 - DNA, 30 bp, Artificial Sequence
  Synthetic oligonucleotide
tgcccccaggggattatgttccacgatata

SEQ ID NO: 509501 - DNA, 30 bp, Artificial Sequence
  Synthetic oligonucleotide
tgtcacagccccccgagagctagggatata

SEQ ID NO: 509502 - DNA, 30 bp, Artificial Sequence
  Synthetic oligonucleotide
cgcgggcatattttcgacaggcgggatata

SEQ ID NO: 509503 - DNA, 30 bp, Artificial Sequence
  Synthetic oligonucleotide
ttaaacaggcagtgttgtacgtgggatata

SEQ ID NO: 509504 - DNA, 30 bp, Artificial Sequence
  Synthetic oligonucleotide
cctgcgttctgtcagctcaattctgatata

SEQ ID NO: 509505 - DNA, 30 bp, Artificial Sequence
  Synthetic oligonucleotide
gagttatacgatcatgtgaaggttgatata

SEQ ID NO: 509506 - DNA, 30 bp, Artificial Sequence
  Synthetic oligonucleotide
tgttattcacggttatattcttaatatata

SEQ ID NO: 509507 - DNA, 30 bp, Artificial Sequence
  Synthetic oligonucleotide
ggttcctgatggcatcaggattcatatata

SEQ ID NO: 509508 - DNA, 30 bp, Artificial Sequence
  Synthetic oligonucleotide
gcaaggtttccgatgcccgccttatatata

SEQ ID NO: 509509 - DNA, 30 bp, Artificial Sequence
  Synthetic oligonucleotide
aaaccccatggttggcatcgttggtatata

SEQ ID NO: 509510 - DNA, 30 bp, Artificial Sequence
  Synthetic oligonucleotide
aatacttgcagcgagggaaaacattatata

SEQ ID NO: 509511 - DNA, 30 bp, Artificial Sequence
  Synthetic oligonucleotide
ttatcttaacgtgagcttacagattatata

SEQ ID NO: 509512 - DNA, 30 bp, Artificial Sequence
  Synthetic oligonucleotide
cgcctcgtcgggccccggtcttattatata

SEQ ID NO: 509513 - DNA, 30 bp, Artificial Sequence
  Synthetic oligonucleotide
gcaatttaagcgacagcgaaaagttatata

SEQ ID NO: 509514 - DNA, 30 bp, Artificial Sequence
  Synthetic oligonucleotide
gtggcttaatggggtgcgcccggttatata

SEQ ID NO: 509515 - DNA, 30 bp, Artificial Sequence
  Synthetic oligonucleotide
tctcgcagcgggtgtataaatctttatata

SEQ ID NO: 509516 - DNA, 30 bp, Artificial Sequence
  Synthetic oligonucleotide
tggcatggtatgcggaggatattttatata

SEQ ID NO: 509517 - DNA, 30 bp, Artificial Sequence
  Synthetic oligonucleotide
tataggtagttcccatctggcacaactata

SEQ ID NO: 509518 - DNA, 30 bp, Artificial Sequence
  Synthetic oligonucleotide
ctttggttaacagatagtatcgcaactata

SEQ ID NO: 509519 - DNA, 30 bp, Artificial Sequence
  Synthetic oligonucleotide
atctgtcacttagtgtgcggggtcactata

SEQ ID NO: 509520 - DNA, 30 bp, Artificial Sequence
  Synthetic oligonucleotide
attaacacattgcaagaggatgtgactata

SEQ ID NO: 509521 - DNA, 30 bp, Artificial Sequence
  Synthetic oligonucleotide
cgcctgtaaataagctcgaagcttactata

SEQ ID NO: 509522 - DNA, 30 bp, Artificial Sequence
  Synthetic oligonucleotide
tagcctctctgggctgtggtcacccctata

SEQ ID NO: 509523 - DNA, 30 bp, Artificial Sequence
  Synthetic oligonucleotide
gggtattctccagggccgggcccccctata

SEQ ID NO: 509524 - DNA, 30 bp, Artificial Sequence
  Synthetic oligonucleotide
gaacgcgtcataaaacgcagtttccctata

SEQ ID NO: 509525 - DNA, 30 bp, Artificial Sequence
  Synthetic oligonucleotide
cccggagtgtctggcacacgacagcctata

SEQ ID NO: 509526 - DNA, 30 bp, Artificial Sequence
  Synthetic oligonucleotide
aaaagtacaactgacgtcctataagctata

SEQ ID NO: 509527 - DNA, 30 bp, Artificial Sequence
  Synthetic oligonucleotide
ggctgttacatcttatcgctacgagctata

SEQ ID NO: 509528 - DNA, 30 bp, Artificial Sequence
  Synthetic oligonucleotide
aagattttgctttggccaccctgagctata

SEQ ID NO: 509529 - DNA, 30 bp, Artificial Sequence
  Synthetic oligonucleotide
gtgtctattttgttgcctgacaacgctata

SEQ ID NO: 509530 - DNA, 30 bp, Artificial Sequence
  Synthetic oligonucleotide
agcacagaagtaccttgcacacgcgctata

SEQ ID NO: 509531 - DNA, 30 bp, Artificial Sequence
  Synthetic oligonucleotide
ttccgctcgttcaagtgtgggttcgctata

SEQ ID NO: 509532 - DNA, 30 bp, Artificial Sequence
  Synthetic oligonucleotide
tatcccgaggccaggtgaacgggggctata

SEQ ID NO: 509533 - DNA, 30 bp, Artificial Sequence
  Synthetic oligonucleotide
gttgagtatcaccgccataaggtggctata

SEQ ID NO: 509534 - DNA, 30 bp, Artificial Sequence
  Synthetic oligonucleotide
gcacaattcctggtcacctccttggctata

SEQ ID NO: 509535 - DNA, 30 bp, Artificial Sequence
  Synthetic oligonucleotide
gcacccttcggcagaatgcatactgctata

SEQ ID NO: 509536 - DNA, 30 bp, Artificial Sequence
  Synthetic oligonucleotide
gatttttaactggctctagctactgctata

SEQ ID NO: 509537 - DNA, 30 bp, Artificial Sequence
  Synthetic oligonucleotide
cctttgagatgttagtatcagcctgctata

SEQ ID NO: 509538 - DNA, 30 bp, Artificial Sequence
  Synthetic oligonucleotide
ttctacctttgcatgccgcaatcgtctata

SEQ ID NO: 509539 - DNA, 30 bp, Artificial Sequence
  Synthetic oligonucleotide
aatcttataagaattttttggaggtctata

SEQ ID NO: 509540 - DNA, 30 bp, Artificial Sequence
  Synthetic oligonucleotide
cccgctcagtataatagtcatccttctata

SEQ ID NO: 509541 - DNA, 30 bp, Artificial Sequence
  Synthetic oligonucleotide
cctcgcttgatgtagcgtctgcgttctata

SEQ ID NO: 509542 - DNA, 30 bp, Artificial Sequence
  Synthetic oligonucleotide
ggggtttacattgagtatacgcaaagtata

SEQ ID NO: 509543 - DNA, 30 bp, Artificial Sequence
  Synthetic oligonucleotide
gcagtgtctattaactctccaagaagtata

SEQ ID NO: 509544 - DNA, 30 bp, Artificial Sequence
  Synthetic oligonucleotide
cttaccaagcggccccgcagtcacagtata

SEQ ID NO: 509545 - DNA, 30 bp, Artificial Sequence
  Synthetic oligonucleotide
atcacttactggtcaccaacgctcagtata

SEQ ID NO: 509546 - DNA, 30 bp, Artificial Sequence
  Synthetic oligonucleotide
caacataagtcgaatgtccccttcagtata

SEQ ID NO: 509547 - DNA, 30 bp, Artificial Sequence
  Synthetic oligonucleotide
tcccacggtagtacccgtatctcgagtata

SEQ ID NO: 509548 - DNA, 30 bp, Artificial Sequence
  Synthetic oligonucleotide
agttcgcgtttaatacctggttctagtata

SEQ ID NO: 509549 - DNA, 30 bp, Artificial Sequence
  Synthetic oligonucleotide
acgccggagttcctacacttaagtagtata

SEQ ID NO: 509550 - DNA, 30 bp, Artificial Sequence
  Synthetic oligonucleotide
aaagcccactggaccaaatccgttagtata

SEQ ID NO: 509551 - DNA, 30 bp, Artificial Sequence
  Synthetic oligonucleotide
tgagtcgcttggaggacttcggttagtata

SEQ ID NO: 509552 - DNA, 30 bp, Artificial Sequence
  Synthetic oligonucleotide
gcacggttaataccagcccctagacgtata

SEQ ID NO: 509553 - DNA, 30 bp, Artificial Sequence
  Synthetic oligonucleotide
gaattaacacaggagttcattgtacgtata

SEQ ID NO: 509554 - DNA, 30 bp, Artificial Sequence
  Synthetic oligonucleotide
tcggcgagcggcggttttttgttacgtata

SEQ ID NO: 509555 - DNA, 30 bp, Artificial Sequence
  Synthetic oligonucleotide
tgtacgatggtgtacgtgtactcccgtata

SEQ ID NO: 509556 - DNA, 30 bp, Artificial Sequence
  Synthetic oligonucleotide
gagtgcgtgtgttgttgtacgaagcgtata

SEQ ID NO: 509557 - DNA, 30 bp, Artificial Sequence
  Synthetic oligonucleotide
cgggtctattatttgatactatcaggtata

SEQ ID NO: 509558 - DNA, 30 bp, Artificial Sequence
  Synthetic oligonucleotide
gtagttgctgtcgactcaaattcaggtata

SEQ ID NO: 509559 - DNA, 30 bp, Artificial Sequence
  Synthetic oligonucleotide
atggcaacagtgtccctcggaggaggtata

SEQ ID NO: 509560 - DNA, 30 bp, Artificial Sequence
  Synthetic oligonucleotide
aacaccctgttaggttatttgtgaggtata

SEQ ID NO: 509561 - DNA, 30 bp, Artificial Sequence
  Synthetic oligonucleotide
gtttatacgcaatttttaaattgaggtata

SEQ ID NO: 509562 - DNA, 30 bp, Artificial Sequence
  Synthetic oligonucleotide
cattgtataaagccaggaacgaagggtata

SEQ ID NO: 509563 - DNA, 30 bp, Artificial Sequence
  Synthetic oligonucleotide
aaagccacagttgcaactcttaagggtata

SEQ ID NO: 509564 - DNA, 30 bp, Artificial Sequence
  Synthetic oligonucleotide
aagctccatgtcccatgatttctgggtata

SEQ ID NO: 509565 - DNA, 30 bp, Artificial Sequence
  Synthetic oligonucleotide
ttagaaccgcctaaggcacgaaatggtata

SEQ ID NO: 509566 - DNA, 30 bp, Artificial Sequence
  Synthetic oligonucleotide
aagcgggataaaccacgggttcatggtata

SEQ ID NO: 509567 - DNA, 30 bp, Artificial Sequence
  Synthetic oligonucleotide
ggccttgaggatagtgactcgtatggtata

SEQ ID NO: 509568 - DNA, 30 bp, Artificial Sequence
  Synthetic oligonucleotide
gggatcttgcagatcgtcgatgctggtata

SEQ ID NO: 509569 - DNA, 30 bp, Artificial Sequence
  Synthetic oligonucleotide
tccgttatctttgaggtatctattggtata

SEQ ID NO: 509570 - DNA, 30 bp, Artificial Sequence
  Synthetic oligonucleotide
cttaagttgaatagcaaacaccttggtata

SEQ ID NO: 509571 - DNA, 30 bp, Artificial Sequence
  Synthetic oligonucleotide
tcccgcgatcgagttcagttgaaatgtata

SEQ ID NO: 509572 - DNA, 30 bp, Artificial Sequence
  Synthetic oligonucleotide
gcggtgaatgctaccctgtcttcctgtata

SEQ ID NO: 509573 - DNA, 30 bp, Artificial Sequence
  Synthetic oligonucleotide
cctcaaatgtattagggtcactagtgtata

SEQ ID NO: 509574 - DNA, 30 bp, Artificial Sequence
  Synthetic oligonucleotide
ttgagtctaagggcgggcttaacgtgtata

SEQ ID NO: 509575 - DNA, 30 bp, Artificial Sequence
  Synthetic oligonucleotide
gacgagtcaacgcagcactcggcgtgtata

SEQ ID NO: 509576 - DNA, 30 bp, Artificial Sequence
  Synthetic oligonucleotide
gagagtagcatttgagatgtagggtgtata

SEQ ID NO: 509577 - DNA, 30 bp, Artificial Sequence
  Synthetic oligonucleotide
attgtactccctgtatataaggggtgtata

SEQ ID NO: 509578 - DNA, 30 bp, Artificial Sequence
  Synthetic oligonucleotide
attcatgtatttgtgcggcagtggtgtata

SEQ ID NO: 509579 - DNA, 30 bp, Artificial Sequence
  Synthetic oligonucleotide
cctgctgaggacctatagttaaattgtata

SEQ ID NO: 509580 - DNA, 30 bp, Artificial Sequence
  Synthetic oligonucleotide
gctatagacccaatggatcaacattgtata

SEQ ID NO: 509581 - DNA, 30 bp, Artificial Sequence
  Synthetic oligonucleotide
atggctcgggtcttcagaccgcgttgtata

SEQ ID NO: 509582 - DNA, 30 bp, Artificial Sequence
  Synthetic oligonucleotide
tatctgtgctgggcagattccggttgtata

SEQ ID NO: 509583 - DNA, 30 bp, Artificial Sequence
  Synthetic oligonucleotide
gtctctctcatttaagtccacaaaattata

SEQ ID NO: 509584 - DNA, 30 bp, Artificial Sequence
  Synthetic oligonucleotide
tgtgtctcaatgtcccgcccaacaattata

SEQ ID NO: 509585 - DNA, 30 bp, Artificial Sequence
  Synthetic oligonucleotide
tgccttgtggtagattacgtaggaattata

SEQ ID NO: 509586 - DNA, 25 bp, Artificial Sequence
  Synthetic oligonucleotide
cttgtatggccaatgtgtaattata

SEQ ID NO: 509587 - DNA, 30 bp, Artificial Sequence
  Synthetic oligonucleotide
taatattcgtacgcaagtagattgattata

SEQ ID NO: 509588 - DNA, 30 bp, Artificial Sequence
  Synthetic oligonucleotide
tgaatgaggcacaaattagagaatattata

SEQ ID NO: 509589 - DNA, 30 bp, Artificial Sequence
  Synthetic oligonucleotide
ctatataaatatcggctacgctatattata

SEQ ID NO: 509590 - DNA, 30 bp, Artificial Sequence
  Synthetic oligonucleotide
attggtttccgttcgacgccaggtattata

SEQ ID NO: 509591 - DNA, 30 bp, Artificial Sequence
  Synthetic oligonucleotide
agccagcagagatttttagaaattattata

SEQ ID NO: 509592 - DNA, 30 bp, Artificial Sequence
  Synthetic oligonucleotide
tgtcggagatatacattttttagccttata

SEQ ID NO: 509593 - DNA, 30 bp, Artificial Sequence
  Synthetic oligonucleotide
aatatcagtatgatatatcaacgccttata

SEQ ID NO: 509594 - DNA, 30 bp, Artificial Sequence
  Synthetic oligonucleotide
ttatcaggatcgtcgcgtggacgccttata

SEQ ID NO: 509595 - DNA, 30 bp, Artificial Sequence
  Synthetic oligonucleotide
aaggtacgaggcttcgcctgagtccttata

SEQ ID NO: 509596 - DNA, 30 bp, Artificial Sequence
  Synthetic oligonucleotide
aagttctcaaagcaaagcggccggcttata

SEQ ID NO: 509597 - DNA, 30 bp, Artificial Sequence
  Synthetic oligonucleotide
cgcgacggctgcttatgcatttatcttata

SEQ ID NO: 509598 - DNA, 30 bp, Artificial Sequence
  Synthetic oligonucleotide
cgttttgataatgcataaagcaaagttata

SEQ ID NO: 509599 - DNA, 30 bp, Artificial Sequence
  Synthetic oligonucleotide
ttgataggcgtatagttttaacgcgttata

SEQ ID NO: 509600 - DNA, 30 bp, Artificial Sequence
  Synthetic oligonucleotide
agcaagcaattttttagcccggcggttata

SEQ ID NO: 509601 - DNA, 30 bp, Artificial Sequence
  Synthetic oligonucleotide
tgacttgaagcttagccagtgtcggttata

SEQ ID NO: 509602 - DNA, 30 bp, Artificial Sequence
  Synthetic oligonucleotide
tacaattgcttcgacgcgagactggttata

SEQ ID NO: 509603 - DNA, 29 bp, Artificial Sequence
  Synthetic oligonucleotide
aatcagtatatacttcgtctctggttata

SEQ ID NO: 509604 - DNA, 30 bp, Artificial Sequence
  Synthetic oligonucleotide
caaacatataacctcgccttagttgttata

SEQ ID NO: 509605 - DNA, 30 bp, Artificial Sequence
  Synthetic oligonucleotide
ggggaacagcatcgcattggtaaatttata

SEQ ID NO: 509606 - DNA, 30 bp, Artificial Sequence
  Synthetic oligonucleotide
tccctcactagtaacttctattaatttata

SEQ ID NO: 509607 - DNA, 30 bp, Artificial Sequence
  Synthetic oligonucleotide
ccgccttcaagttactgtggcagctttata

SEQ ID NO: 509608 - DNA, 30 bp, Artificial Sequence
  Synthetic oligonucleotide
aacccgaacgtctcactggatcagtttata

SEQ ID NO: 509609 - DNA, 30 bp, Artificial Sequence
  Synthetic oligonucleotide
tattgtattaaaccttcattttagtttata

SEQ ID NO: 509610 - DNA, 30 bp, Artificial Sequence
  Synthetic oligonucleotide
ccgcactaagactgcaggttcctgtttata

SEQ ID NO: 509611 - DNA, 30 bp, Artificial Sequence
  Synthetic oligonucleotide
tgtcggatactctcccttattttttttata

SEQ ID NO: 509612 - DNA, 31 bp, Artificial Sequence
  Synthetic oligonucleotide
ggattcaagctgacgtgtactttccaaacta

SEQ ID NO: 509613 - DNA, 30 bp, Artificial Sequence
  Synthetic oligonucleotide
gtcgcatgattaaagcgggaccgcaaacta

SEQ ID NO: 509614 - DNA, 30 bp, Artificial Sequence
  Synthetic oligonucleotide
ggatacggatttattccgcaatagaaacta

SEQ ID NO: 509615 - DNA, 30 bp, Artificial Sequence
  Synthetic oligonucleotide
cattggacccgtaaccaaagaccgaaacta

SEQ ID NO: 509616 - DNA, 30 bp, Artificial Sequence
  Synthetic oligonucleotide
tgcctgttcttaaaccccttatcgaaacta

SEQ ID NO: 509617 - DNA, 30 bp, Artificial Sequence
  Synthetic oligonucleotide
gccatcagttcgagcgacggtaggaaacta

SEQ ID NO: 509618 - DNA, 30 bp, Artificial Sequence
  Synthetic oligonucleotide
ggaaactaacacctgctatctcataaacta

SEQ ID NO: 509619 - DNA, 30 bp, Artificial Sequence
  Synthetic oligonucleotide
ccggttatacaagcatccagcgataaacta

SEQ ID NO: 509620 - DNA, 30 bp, Artificial Sequence
  Synthetic oligonucleotide
aactgctaggcaggtaagctcattaaacta

SEQ ID NO: 509621 - DNA, 30 bp, Artificial Sequence
  Synthetic oligonucleotide
aacttgatcgtttatatgtatattaaacta

SEQ ID NO: 509622 - DNA, 30 bp, Artificial Sequence
  Synthetic oligonucleotide
aaattgtcgaatgacactctcacgcaacta

SEQ ID NO: 509623 - DNA, 30 bp, Artificial Sequence
  Synthetic oligonucleotide
tgagcttggctgaatgaaacgtcgcaacta

SEQ ID NO: 509624 - DNA, 30 bp, Artificial Sequence
  Synthetic oligonucleotide
cttagggggtatctctaggggtggcaacta

SEQ ID NO: 509625 - DNA, 30 bp, Artificial Sequence
  Synthetic oligonucleotide
ggcccatcttacttataagaacctcaacta

SEQ ID NO: 509626 - DNA, 30 bp, Artificial Sequence
  Synthetic oligonucleotide
agtaaatctctcatctctacggacgaacta

SEQ ID NO: 509627 - DNA, 30 bp, Artificial Sequence
  Synthetic oligonucleotide
ggggacttagacggctgtggaagcgaacta

SEQ ID NO: 509628 - DNA, 30 bp, Artificial Sequence
  Synthetic oligonucleotide
aattccttgagtcgccatagagtcgaacta

SEQ ID NO: 509629 - DNA, 30 bp, Artificial Sequence
  Synthetic oligonucleotide
gaatctgttatgcggtattcggtcgaacta

SEQ ID NO: 509630 - DNA, 30 bp, Artificial Sequence
  Synthetic oligonucleotide
gaatcttgtcttcaagtagctacggaacta

SEQ ID NO: 509631 - DNA, 30 bp, Artificial Sequence
  Synthetic oligonucleotide
cagatttttcacacctcttagggtgaacta

SEQ ID NO: 509632 - DNA, 30 bp, Artificial Sequence
  Synthetic oligonucleotide
ggtttacgatagctcgttcatggtgaacta

SEQ ID NO: 509633 - DNA, 30 bp, Artificial Sequence
  Synthetic oligonucleotide
ttacatgcttggggacgtgcaaaataacta

SEQ ID NO: 509634 - DNA, 30 bp, Artificial Sequence
  Synthetic oligonucleotide
gctgtgatacttatgtctaaagactaacta

SEQ ID NO: 509635 - DNA, 30 bp, Artificial Sequence
  Synthetic oligonucleotide
tacaccgaggggaaggcggcgcgctaacta

SEQ ID NO: 509636 - DNA, 30 bp, Artificial Sequence
  Synthetic oligonucleotide
attgtccaaatataggacctgtgctaacta

SEQ ID NO: 509637 - DNA, 29 bp, Artificial Sequence
  Synthetic oligonucleotide
cttatgctggtgtagatgcagcttaacta

SEQ ID NO: 509638 - DNA, 30 bp, Artificial Sequence
  Synthetic oligonucleotide
gcagctaaaccaaattgtgtattaacacta

SEQ ID NO: 509639 - DNA, 30 bp, Artificial Sequence
  Synthetic oligonucleotide
gtggaatagaatgcgctatcgcacacacta

SEQ ID NO: 509640 - DNA, 30 bp, Artificial Sequence
  Synthetic oligonucleotide
gacatttctccgttgtctccccccacacta

SEQ ID NO: 509641 - DNA, 30 bp, Artificial Sequence
  Synthetic oligonucleotide
aagcctcaattttcttcgcatgagacacta

SEQ ID NO: 509642 - DNA, 30 bp, Artificial Sequence
  Synthetic oligonucleotide
gagttaccagtggtacatttctagacacta

SEQ ID NO: 509643 - DNA, 30 bp, Artificial Sequence
  Synthetic oligonucleotide
atcacagattggatggcactatttacacta

SEQ ID NO: 509644 - DNA, 30 bp, Artificial Sequence
  Synthetic oligonucleotide
ctattttgtcggaacgattttaaaccacta

SEQ ID NO: 509645 - DNA, 30 bp, Artificial Sequence
  Synthetic oligonucleotide
atctgtgtaagtgtaatcggacttccacta

SEQ ID NO: 509646 - DNA, 30 bp, Artificial Sequence
  Synthetic oligonucleotide
ggaggggtcgtgcattgtgtcacagcacta

SEQ ID NO: 509647 - DNA, 30 bp, Artificial Sequence
  Synthetic oligonucleotide
aagagcagggagggttaataaatagcacta

SEQ ID NO: 509648 - DNA, 30 bp, Artificial Sequence
  Synthetic oligonucleotide
ttgagacggcggttcagataatacgcacta

SEQ ID NO: 509649 - DNA, 30 bp, Artificial Sequence
  Synthetic oligonucleotide
accatacccgaacctccttctcccgcacta

SEQ ID NO: 509650 - DNA, 30 bp, Artificial Sequence
  Synthetic oligonucleotide
attatttgatgcccaaggccaagcgcacta

SEQ ID NO: 509651 - DNA, 30 bp, Artificial Sequence
  Synthetic oligonucleotide
taataacgggctagtgctcgcttcgcacta

SEQ ID NO: 509652 - DNA, 30 bp, Artificial Sequence
  Synthetic oligonucleotide
gaaacgttcggtcggggtattgaggcacta

SEQ ID NO: 509653 - DNA, 30 bp, Artificial Sequence
  Synthetic oligonucleotide
cggcagctgccgcagcgagccagggcacta

SEQ ID NO: 509654 - DNA, 30 bp, Artificial Sequence
  Synthetic oligonucleotide
atgcagtcattgcgaagacctcgggcacta

SEQ ID NO: 509655 - DNA, 30 bp, Artificial Sequence
  Synthetic oligonucleotide
atgcctggggttccaagggcctttgcacta

SEQ ID NO: 509656 - DNA, 30 bp, Artificial Sequence
  Synthetic oligonucleotide
gtgtgaggtacctacaagtatacctcacta

SEQ ID NO: 509657 - DNA, 30 bp, Artificial Sequence
  Synthetic oligonucleotide
cagtgaatttacccagcacagtgctcacta

SEQ ID NO: 509658 - DNA, 33 bp, Artificial Sequence
  Synthetic oligonucleotide
tgttttccttcttacctttatgctgcgtcacta

SEQ ID NO: 509659 - DNA, 30 bp, Artificial Sequence
  Synthetic oligonucleotide
cattttttcttgtcattatccaaaagacta

SEQ ID NO: 509660 - DNA, 30 bp, Artificial Sequence
  Synthetic oligonucleotide
aatgacgcattaatagagtgatacagacta

SEQ ID NO: 509661 - DNA, 30 bp, Artificial Sequence
  Synthetic oligonucleotide
aattagtcacgatccgcgatatacagacta

SEQ ID NO: 509662 - DNA, 30 bp, Artificial Sequence
  Synthetic oligonucleotide
gtactaaggaccagaccgtggcgcagacta

SEQ ID NO: 509663 - DNA, 30 bp, Artificial Sequence
  Synthetic oligonucleotide
cgggtccaagccttatagtctttcagacta

SEQ ID NO: 509664 - DNA, 30 bp, Artificial Sequence
  Synthetic oligonucleotide
cactagccgctgtaaccgactccacgacta

SEQ ID NO: 509665 - DNA, 30 bp, Artificial Sequence
  Synthetic oligonucleotide
cacaattacacatcattagtcttacgacta

SEQ ID NO: 509666 - DNA, 30 bp, Artificial Sequence
  Synthetic oligonucleotide
ccgcgtgaatgctgcatcggattccgacta

SEQ ID NO: 509667 - DNA, 30 bp, Artificial Sequence
  Synthetic oligonucleotide
ctatttgattttatggctagtaggcgacta

SEQ ID NO: 509668 - DNA, 30 bp, Artificial Sequence
  Synthetic oligonucleotide
gcagatctggaattaacgttataaggacta

SEQ ID NO: 509669 - DNA, 30 bp, Artificial Sequence
  Synthetic oligonucleotide
cggcttatgaagggttgataacccggacta

SEQ ID NO: 509670 - DNA, 30 bp, Artificial Sequence
  Synthetic oligonucleotide
ggggagatatgtaactaatcctgcggacta

SEQ ID NO: 509671 - DNA, 30 bp, Artificial Sequence
  Synthetic oligonucleotide
gtactctctctgcagtttggcatcggacta

SEQ ID NO: 509672 - DNA, 30 bp, Artificial Sequence
  Synthetic oligonucleotide
attggatctttttcatcgtatttcggacta

SEQ ID NO: 509673 - DNA, 30 bp, Artificial Sequence
  Synthetic oligonucleotide
tgtcagagcttaacaaatcgattgggacta

SEQ ID NO: 509674 - DNA, 30 bp, Artificial Sequence
  Synthetic oligonucleotide
tttgcactaagaattttatctaatggacta

SEQ ID NO: 509675 - DNA, 30 bp, Artificial Sequence
  Synthetic oligonucleotide
aagggttccctatccagcataactggacta

SEQ ID NO: 509676 - DNA, 30 bp, Artificial Sequence
  Synthetic oligonucleotide
ttttacgcaaccacatcctctggtggacta

SEQ ID NO: 509677 - DNA, 30 bp, Artificial Sequence
  Synthetic oligonucleotide
gttttagccgtggagcgttagcgctgacta

SEQ ID NO: 509678 - DNA, 30 bp, Artificial Sequence
  Synthetic oligonucleotide
agacctagtaggaatcacatcctctgacta

SEQ ID NO: 509679 - DNA, 30 bp, Artificial Sequence
  Synthetic oligonucleotide
gcaaccccatcgcgacttggtctctgacta

SEQ ID NO: 509680 - DNA, 30 bp, Artificial Sequence
  Synthetic oligonucleotide
agggcacccacgataactgagtcgtgacta

SEQ ID NO: 509681 - DNA, 30 bp, Artificial Sequence
  Synthetic oligonucleotide
cccatttatcgaaataattatcgttgacta

SEQ ID NO: 509682 - DNA, 30 bp, Artificial Sequence
  Synthetic oligonucleotide
gagcgggttgctagttgaggactttgacta

SEQ ID NO: 509683 - DNA, 30 bp, Artificial Sequence
  Synthetic oligonucleotide
gcattttttaatgttaatgaagtcatacta

SEQ ID NO: 509684 - DNA, 30 bp, Artificial Sequence
  Synthetic oligonucleotide
cctaggcggagagtagcattcgtcatacta

SEQ ID NO: 509685 - DNA, 30 bp, Artificial Sequence
  Synthetic oligonucleotide
ggtctaccaggtgccacgggagagatacta

SEQ ID NO: 509686 - DNA, 30 bp, Artificial Sequence
  Synthetic oligonucleotide
ggttcgtatataattttttgctctatacta

SEQ ID NO: 509687 - DNA, 30 bp, Artificial Sequence
  Synthetic oligonucleotide
ccttgggtattaaatatctcgggtatacta

SEQ ID NO: 509688 - DNA, 30 bp, Artificial Sequence
  Synthetic oligonucleotide
ccgttctcgccctcctcgatagcactacta

SEQ ID NO: 509689 - DNA, 30 bp, Artificial Sequence
  Synthetic oligonucleotide
caataggccgccggagggtttctgctacta

SEQ ID NO: 509690 - DNA, 30 bp, Artificial Sequence
  Synthetic oligonucleotide
tatgatgtgcattcagtgggggtgctacta

SEQ ID NO: 509691 - DNA, 30 bp, Artificial Sequence
  Synthetic oligonucleotide
gccaatcttcctgggtccagccgtctacta

SEQ ID NO: 509692 - DNA, 30 bp, Artificial Sequence
  Synthetic oligonucleotide
aactttgcgcgcagtactccactagtacta

SEQ ID NO: 509693 - DNA, 30 bp, Artificial Sequence
  Synthetic oligonucleotide
atggatcatcttggatataagctcgtacta

SEQ ID NO: 509694 - DNA, 30 bp, Artificial Sequence
  Synthetic oligonucleotide
tacacaccggggtagcgtccgttcgtacta

SEQ ID NO: 509695 - DNA, 30 bp, Artificial Sequence
  Synthetic oligonucleotide
cttttacggtgttaatgaactgtggtacta

SEQ ID NO: 509696 - DNA, 30 bp, Artificial Sequence
  Synthetic oligonucleotide
agcttaactggtacccatcttcgtgtacta

SEQ ID NO: 509697 - DNA, 30 bp, Artificial Sequence
  Synthetic oligonucleotide
tgattttatgaccggtgccttggtgtacta

SEQ ID NO: 509698 - DNA, 30 bp, Artificial Sequence
  Synthetic oligonucleotide
gagttgaatcggtcgattgtagcattacta

SEQ ID NO: 509699 - DNA, 30 bp, Artificial Sequence
  Synthetic oligonucleotide
cgtccttctgggtcgctgcaagccttacta

SEQ ID NO: 509700 - DNA, 30 bp, Artificial Sequence
  Synthetic oligonucleotide
atgttatttaaccaccgtgaaaagttacta

SEQ ID NO: 509701 - DNA, 30 bp, Artificial Sequence
  Synthetic oligonucleotide
ctgcataggctaaccattcgaaagttacta

SEQ ID NO: 509702 - DNA, 30 bp, Artificial Sequence
  Synthetic oligonucleotide
caggtgcccaaatcgagtaatgatttacta

SEQ ID NO: 509703 - DNA, 30 bp, Artificial Sequence
  Synthetic oligonucleotide
gatgttattgtagaactgtccgctttacta

SEQ ID NO: 509704 - DNA, 30 bp, Artificial Sequence
  Synthetic oligonucleotide
gggggctagcccgtagacgggtctttacta

SEQ ID NO: 509705 - DNA, 30 bp, Artificial Sequence
  Synthetic oligonucleotide
gacccgatcttcacagccagtggtttacta

SEQ ID NO: 509706 - DNA, 30 bp, Artificial Sequence
  Synthetic oligonucleotide
gcgtattttctgtgcctgttgcttttacta

SEQ ID NO: 509707 - DNA, 30 bp, Artificial Sequence
  Synthetic oligonucleotide
ctccgtcgagaccatagcgggtttttacta

SEQ ID NO: 509708 - DNA, 30 bp, Artificial Sequence
  Synthetic oligonucleotide
gattatcgagggagcatgcgctaaaaccta

SEQ ID NO: 509709 - DNA, 31 bp, Artificial Sequence
  Synthetic oligonucleotide
tcgactgggacggggctcaacgtcaaaccta

SEQ ID NO: 509710 - DNA, 30 bp, Artificial Sequence
  Synthetic oligonucleotide
gacctcaactacgtggggcgcggaaaccta

SEQ ID NO: 509711 - DNA, 30 bp, Artificial Sequence
  Synthetic oligonucleotide
ggggaagcaatataataaggtaggaaccta

SEQ ID NO: 509712 - DNA, 31 bp, Artificial Sequence
  Synthetic oligonucleotide
tccggccttcaccccattgaaggtacaccta

SEQ ID NO: 509713 - DNA, 30 bp, Artificial Sequence
  Synthetic oligonucleotide
taaaagaagaggcttacattggtccaccta

SEQ ID NO: 509714 - DNA, 29 bp, Artificial Sequence
  Synthetic oligonucleotide
gaattttctttagcacagttgaagaccta

SEQ ID NO: 509715 - DNA, 30 bp, Artificial Sequence
  Synthetic oligonucleotide
aggcaagccgagcgaaacgaaagcgaccta

SEQ ID NO: 509716 - DNA, 30 bp, Artificial Sequence
  Synthetic oligonucleotide
ccctgcctgaagttggcgcgtcgggaccta

SEQ ID NO: 509717 - DNA, 30 bp, Artificial Sequence
  Synthetic oligonucleotide
tttgtattagagacacgagctttggaccta

SEQ ID NO: 509718 - DNA, 30 bp, Artificial Sequence
  Synthetic oligonucleotide
tgctgtttttgcggtagtacggcataccta

SEQ ID NO: 509719 - DNA, 30 bp, Artificial Sequence
  Synthetic oligonucleotide
acaacatgatagttcggtcagagataccta

SEQ ID NO: 509720 - DNA, 30 bp, Artificial Sequence
  Synthetic oligonucleotide
gtctatttctgcagaaggtgttagtaccta

SEQ ID NO: 509721 - DNA, 30 bp, Artificial Sequence
  Synthetic oligonucleotide
taacctacgtggaagccttaggcgtaccta

SEQ ID NO: 509722 - DNA, 30 bp, Artificial Sequence
  Synthetic oligonucleotide
agttaacgcaaaagtgtgggcgattaccta

SEQ ID NO: 509723 - DNA, 30 bp, Artificial Sequence
  Synthetic oligonucleotide
tccgggatgcctggacatacggagacccta

SEQ ID NO: 509724 - DNA, 30 bp, Artificial Sequence
  Synthetic oligonucleotide
gtgtagcaatagttttccatcagtacccta

SEQ ID NO: 509725 - DNA, 30 bp, Artificial Sequence
  Synthetic oligonucleotide
actttttacgactgtacggaggcaccccta

SEQ ID NO: 509726 - DNA, 30 bp, Artificial Sequence
  Synthetic oligonucleotide
agaatgacttttttttagattcagccccta

SEQ ID NO: 509727 - DNA, 30 bp, Artificial Sequence
  Synthetic oligonucleotide
accggtccgtgcagtatttcgaaagcccta

SEQ ID NO: 509728 - DNA, 30 bp, Artificial Sequence
  Synthetic oligonucleotide
tgacactagacgctgcatctatgcgcccta

SEQ ID NO: 509729 - DNA, 30 bp, Artificial Sequence
  Synthetic oligonucleotide
atggtgtacaatagaattagtctggcccta

SEQ ID NO: 509730 - DNA, 30 bp, Artificial Sequence
  Synthetic oligonucleotide
aatagtatttcttcgagagcaaaatcccta

SEQ ID NO: 509731 - DNA, 30 bp, Artificial Sequence
  Synthetic oligonucleotide
gccgtaggtttaagctttggtaaatcccta

SEQ ID NO: 509732 - DNA, 30 bp, Artificial Sequence
  Synthetic oligonucleotide
gttaaagtggatgctatcggcttatcccta

SEQ ID NO: 509733 - DNA, 30 bp, Artificial Sequence
  Synthetic oligonucleotide
cgcactaatattaggggttctcattcccta

SEQ ID NO: 509734 - DNA, 30 bp, Artificial Sequence
  Synthetic oligonucleotide
aattggatgagcccgagtgtcaaaagccta

SEQ ID NO: 509735 - DNA, 30 bp, Artificial Sequence
  Synthetic oligonucleotide
ggggttgatttctgtaccgcgtacagccta

SEQ ID NO: 509736 - DNA, 30 bp, Artificial Sequence
  Synthetic oligonucleotide
gtccaatttagctgccgaggtgagagccta

SEQ ID NO: 509737 - DNA, 30 bp, Artificial Sequence
  Synthetic oligonucleotide
tgagacgcataaacgcctatgctgagccta

SEQ ID NO: 509738 - DNA, 30 bp, Artificial Sequence
  Synthetic oligonucleotide
gactgctggaaacaatatagcgtgagccta

SEQ ID NO: 509739 - DNA, 30 bp, Artificial Sequence
  Synthetic oligonucleotide
gaatgacgccgcggcggagaccatagccta

SEQ ID NO: 509740 - DNA, 30 bp, Artificial Sequence
  Synthetic oligonucleotide
tccagacggtggagtggctctgatagccta

SEQ ID NO: 509741 - DNA, 30 bp, Artificial Sequence
  Synthetic oligonucleotide
tgacctggtgtcgcggcgggtgctagccta

SEQ ID NO: 509742 - DNA, 30 bp, Artificial Sequence
  Synthetic oligonucleotide
attatcgcaggagttgtaactgtccgccta

SEQ ID NO: 509743 - DNA, 30 bp, Artificial Sequence
  Synthetic oligonucleotide
agataggatatggagcataacaatcgccta

SEQ ID NO: 509744 - DNA, 30 bp, Artificial Sequence
  Synthetic oligonucleotide
aatcgtttctacaaagcccgcggaggccta

SEQ ID NO: 509745 - DNA, 30 bp, Artificial Sequence
  Synthetic oligonucleotide
tgtcagatgtagtgtagttaggccggccta

SEQ ID NO: 509746 - DNA, 30 bp, Artificial Sequence
  Synthetic oligonucleotide
accggctgaagcttctaacatctcggccta

SEQ ID NO: 509747 - DNA, 30 bp, Artificial Sequence
  Synthetic oligonucleotide
ggccaaccgtggtagataaaacgtggccta

SEQ ID NO: 509748 - DNA, 30 bp, Artificial Sequence
  Synthetic oligonucleotide
agagggtctctttactgttcgcttggccta

SEQ ID NO: 509749 - DNA, 30 bp, Artificial Sequence
  Synthetic oligonucleotide
tttgtcctcaggtttagcgtaaaatgccta

SEQ ID NO: 509750 - DNA, 30 bp, Artificial Sequence
  Synthetic oligonucleotide
agttaaaatgaggaattatgagaatgccta

SEQ ID NO: 509751 - DNA, 30 bp, Artificial Sequence
  Synthetic oligonucleotide
attcacgtaatagagagcagaatctgccta

SEQ ID NO: 509752 - DNA, 30 bp, Artificial Sequence
  Synthetic oligonucleotide
tgcagcattggcatctagaccatgtgccta

SEQ ID NO: 509753 - DNA, 30 bp, Artificial Sequence
  Synthetic oligonucleotide
tccatattatgcggtgccctgttgtgccta

SEQ ID NO: 509754 - DNA, 30 bp, Artificial Sequence
  Synthetic oligonucleotide
tttttgcgcgctattcagggctattgccta

SEQ ID NO: 509755 - DNA, 30 bp, Artificial Sequence
  Synthetic oligonucleotide
ttactgacaagacgcccttagaaaatccta

SEQ ID NO: 509756 - DNA, 30 bp, Artificial Sequence
  Synthetic oligonucleotide
aatgtgctgcaaatatatatgtaaatccta

SEQ ID NO: 509757 - DNA, 30 bp, Artificial Sequence
  Synthetic oligonucleotide
actcgtctatcattttaatagaaactccta

SEQ ID NO: 509758 - DNA, 30 bp, Artificial Sequence
  Synthetic oligonucleotide
tttttctcactcgacatcggtatactccta

SEQ ID NO: 509759 - DNA, 30 bp, Artificial Sequence
  Synthetic oligonucleotide
ataagcggcttttgtgccgtctggctccta

SEQ ID NO: 509760 - DNA, 30 bp, Artificial Sequence
  Synthetic oligonucleotide
tttttttgcggtaccgatgtctcagtccta

SEQ ID NO: 509761 - DNA, 30 bp, Artificial Sequence
  Synthetic oligonucleotide
atttatttgggtgttgccagcttagtccta

SEQ ID NO: 509762 - DNA, 30 bp, Artificial Sequence
  Synthetic oligonucleotide
gtacaagaaaaggcggtatgaatggtccta

SEQ ID NO: 509763 - DNA, 30 bp, Artificial Sequence
  Synthetic oligonucleotide
cattggaacatacgacatttgtatgtccta

SEQ ID NO: 509764 - DNA, 30 bp, Artificial Sequence
  Synthetic oligonucleotide
gcccccggaatgtgccgtctgggtgtccta

SEQ ID NO: 509765 - DNA, 30 bp, Artificial Sequence
  Synthetic oligonucleotide
acctgttatccaggacataggttattccta

SEQ ID NO: 509766 - DNA, 30 bp, Artificial Sequence
  Synthetic oligonucleotide
gtcggatttatcggctaagtcaacttccta

SEQ ID NO: 509767 - DNA, 30 bp, Artificial Sequence
  Synthetic oligonucleotide
tacgcacttgcaatgtaacggtccttccta

SEQ ID NO: 509768 - DNA, 30 bp, Artificial Sequence
  Synthetic oligonucleotide
cgtccccacggcggtatagtgtgcttccta

SEQ ID NO: 509769 - DNA, 30 bp, Artificial Sequence
  Synthetic oligonucleotide
cgtcgtctagcgatgcgcaagtagttccta

SEQ ID NO: 509770 - DNA, 30 bp, Artificial Sequence
  Synthetic oligonucleotide
gatacctatatgttacgtatctcgttccta

SEQ ID NO: 509771 - DNA, 30 bp, Artificial Sequence
  Synthetic oligonucleotide
gtggacagcagtatggacgacaggttccta

SEQ ID NO: 509772 - DNA, 30 bp, Artificial Sequence
  Synthetic oligonucleotide
tttcttactgccctcacggagcaaaagcta

SEQ ID NO: 509773 - DNA, 30 bp, Artificial Sequence
  Synthetic oligonucleotide
ttaaacactgtttcttagaaggtaaagcta

SEQ ID NO: 509774 - DNA, 30 bp, Artificial Sequence
  Synthetic oligonucleotide
acctctattttaagttggcgagccaagcta

SEQ ID NO: 509775 - DNA, 30 bp, Artificial Sequence
  Synthetic oligonucleotide
atgctttatttttgcttctgagggaagcta

SEQ ID NO: 509776 - DNA, 30 bp, Artificial Sequence
  Synthetic oligonucleotide
agtccaatagttcggtttattcctaagcta

SEQ ID NO: 509777 - DNA, 30 bp, Artificial Sequence
  Synthetic oligonucleotide
gatatacattcgacgccgcggattaagcta

SEQ ID NO: 509778 - DNA, 30 bp, Artificial Sequence
  Synthetic oligonucleotide
ttagtgagatcacattgtgccgttaagcta

SEQ ID NO: 509779 - DNA, 30 bp, Artificial Sequence
  Synthetic oligonucleotide
aacttttttgtgatgtaacacagacagcta

SEQ ID NO: 509780 - DNA, 30 bp, Artificial Sequence
  Synthetic oligonucleotide
atcgctctcacaacgcatagtcagcagcta

SEQ ID NO: 509781 - DNA, 30 bp, Artificial Sequence
  Synthetic oligonucleotide
ctcgggccggggcagtttcctaggcagcta

SEQ ID NO: 509782 - DNA, 30 bp, Artificial Sequence
  Synthetic oligonucleotide
ggctctcattgttagaacgcactgcagcta

SEQ ID NO: 509783 - DNA, 30 bp, Artificial Sequence
  Synthetic oligonucleotide
tacggccatgtcccacgcggtccagagcta

SEQ ID NO: 509784 - DNA, 30 bp, Artificial Sequence
  Synthetic oligonucleotide
actgaataagaggcagagggctccgagcta

SEQ ID NO: 509785 - DNA, 30 bp, Artificial Sequence
  Synthetic oligonucleotide
tatgcaacaagagatggtgctcgcgagcta

SEQ ID NO: 509786 - DNA, 30 bp, Artificial Sequence
  Synthetic oligonucleotide
ggaatttttctaaaaaatctctcggagcta

SEQ ID NO: 509787 - DNA, 30 bp, Artificial Sequence
  Synthetic oligonucleotide
cactatactcggagtattgcctatgagcta

SEQ ID NO: 509788 - DNA, 30 bp, Artificial Sequence
  Synthetic oligonucleotide
cggctcccgggattttgccacagtgagcta

SEQ ID NO: 509789 - DNA, 30 bp, Artificial Sequence
  Synthetic oligonucleotide
tgcatcagacacaaatcgatcaaatagcta

SEQ ID NO: 509790 - DNA, 30 bp, Artificial Sequence
  Synthetic oligonucleotide
tacaggtccctgttggagatcgaatagcta

SEQ ID NO: 509791 - DNA, 30 bp, Artificial Sequence
  Synthetic oligonucleotide
agttttgttagtgctacaactatatagcta

SEQ ID NO: 509792 - DNA, 30 bp, Artificial Sequence
  Synthetic oligonucleotide
gtttcgcgggtgtgtcggtgtatgtagcta

SEQ ID NO: 509793 - DNA, 30 bp, Artificial Sequence
  Synthetic oligonucleotide
gcttaaattttacgtttacaactgtagcta

SEQ ID NO: 509794 - DNA, 30 bp, Artificial Sequence
  Synthetic oligonucleotide
gcaccgccggtttgaacacgtgtgtagcta

SEQ ID NO: 509795 - DNA, 30 bp, Artificial Sequence
  Synthetic oligonucleotide
attatgatattatatggtggattgtagcta

SEQ ID NO: 509796 - DNA, 30 bp, Artificial Sequence
  Synthetic oligonucleotide
ctagatgatagcatgcggcaagtttagcta

SEQ ID NO: 509797 - DNA, 30 bp, Artificial Sequence
  Synthetic oligonucleotide
tagtaacaaacatttgccgggttaacgcta

SEQ ID NO: 509798 - DNA, 30 bp, Artificial Sequence
  Synthetic oligonucleotide
tacattatgggactgctaagtggcacgcta

SEQ ID NO: 509799 - DNA, 30 bp, Artificial Sequence
  Synthetic oligonucleotide
gtacttttccatttagggttatagacgcta

SEQ ID NO: 509800 - DNA, 30 bp, Artificial Sequence
  Synthetic oligonucleotide
acagatgattcttatgcatattggacgcta

SEQ ID NO: 509801 - DNA, 30 bp, Artificial Sequence
  Synthetic oligonucleotide
atattacgcaaagcgctatttatgacgcta

SEQ ID NO: 509802 - DNA, 30 bp, Artificial Sequence
  Synthetic oligonucleotide
gatagtcttgcttcattaaggctgacgcta

SEQ ID NO: 509803 - DNA, 30 bp, Artificial Sequence
  Synthetic oligonucleotide
aaagccgacagggtagcgcttactacgcta

SEQ ID NO: 509804 - DNA, 30 bp, Artificial Sequence
  Synthetic oligonucleotide
tatgattaccggtcgaaactttgtacgcta

SEQ ID NO: 509805 - DNA, 30 bp, Artificial Sequence
  Synthetic oligonucleotide
aatgctagaaagcacgcacatagcccgcta

SEQ ID NO: 509806 - DNA, 30 bp, Artificial Sequence
  Synthetic oligonucleotide
tccgtaacactggcccgcgttgagccgcta

SEQ ID NO: 509807 - DNA, 30 bp, Artificial Sequence
  Synthetic oligonucleotide
cgagcatagacgcgtcacttgatgccgcta

SEQ ID NO: 509808 - DNA, 30 bp, Artificial Sequence
  Synthetic oligonucleotide
tttgagtggcttcctctgggcggtccgcta

SEQ ID NO: 509809 - DNA, 30 bp, Artificial Sequence
  Synthetic oligonucleotide
tgagtccagtatattagacgagaagcgcta

SEQ ID NO: 509810 - DNA, 30 bp, Artificial Sequence
  Synthetic oligonucleotide
gcatcatgcaggatgggagggacagcgcta

SEQ ID NO: 509811 - DNA, 30 bp, Artificial Sequence
  Synthetic oligonucleotide
aacctcgacggcatagtgaacggagcgcta

SEQ ID NO: 509812 - DNA, 30 bp, Artificial Sequence
  Synthetic oligonucleotide
tttcgcaactttttcatttcccacgcgcta

SEQ ID NO: 509813 - DNA, 30 bp, Artificial Sequence
  Synthetic oligonucleotide
cgcataggatcatttctttaagacgcgcta

SEQ ID NO: 509814 - DNA, 30 bp, Artificial Sequence
  Synthetic oligonucleotide
cagagcaccgttgatgggttggacgcgcta

SEQ ID NO: 509815 - DNA, 30 bp, Artificial Sequence
  Synthetic oligonucleotide
ctgacgatcggctcatagctatacgcgcta

SEQ ID NO: 509816 - DNA, 30 bp, Artificial Sequence
  Synthetic oligonucleotide
tcactgttttttattaaggattacgcgcta

SEQ ID NO: 509817 - DNA, 30 bp, Artificial Sequence
  Synthetic oligonucleotide
cactcgtggctgtttcatccgtaggcgcta

SEQ ID NO: 509818 - DNA, 30 bp, Artificial Sequence
  Synthetic oligonucleotide
tcgggagctttttaagggtatccggcgcta

SEQ ID NO: 509819 - DNA, 30 bp, Artificial Sequence
  Synthetic oligonucleotide
actaccgaaatttaatttcaccgggcgcta

SEQ ID NO: 509820 - DNA, 30 bp, Artificial Sequence
  Synthetic oligonucleotide
aaataccgcttcttcttttacatggcgcta

SEQ ID NO: 509821 - DNA, 30 bp, Artificial Sequence
  Synthetic oligonucleotide
gctttatgtgaattcataattgaatcgcta

SEQ ID NO: 509822 - DNA, 30 bp, Artificial Sequence
  Synthetic oligonucleotide
cattggaacatggtttcggtagtctcgcta

SEQ ID NO: 509823 - DNA, 30 bp, Artificial Sequence
  Synthetic oligonucleotide
gacttagtgatgtagcagctgacgtcgcta

SEQ ID NO: 509824 - DNA, 30 bp, Artificial Sequence
  Synthetic oligonucleotide
tcgcctcggcctatgattaggatgtcgcta

SEQ ID NO: 509825 - DNA, 30 bp, Artificial Sequence
  Synthetic oligonucleotide
gattcccgtcgtagtggatcagtgtcgcta

SEQ ID NO: 509826 - DNA, 30 bp, Artificial Sequence
  Synthetic oligonucleotide
ggccgcgctagccaggatgctaaaaggcta

SEQ ID NO: 509827 - DNA, 30 bp, Artificial Sequence
  Synthetic oligonucleotide
taaaattaaccggattcttcctccaggcta

SEQ ID NO: 509828 - DNA, 30 bp, Artificial Sequence
  Synthetic oligonucleotide
ctctcccaacgctatgtagttttcaggcta

SEQ ID NO: 509829 - DNA, 30 bp, Artificial Sequence
  Synthetic oligonucleotide
agcaacctactgaccagacgccagaggcta

SEQ ID NO: 509830 - DNA, 30 bp, Artificial Sequence
  Synthetic oligonucleotide
gccctctaggagttcaatacctggaggcta

SEQ ID NO: 509831 - DNA, 30 bp, Artificial Sequence
  Synthetic oligonucleotide
aatgggcgtagccgcctcaagacacggcta

SEQ ID NO: 509832 - DNA, 30 bp, Artificial Sequence
  Synthetic oligonucleotide
aggccaaatgcgtaagagtgtacacggcta

SEQ ID NO: 509833 - DNA, 30 bp, Artificial Sequence
  Synthetic oligonucleotide
gcgtttatactgattggctaaagacggcta

SEQ ID NO: 509834 - DNA, 30 bp, Artificial Sequence
  Synthetic oligonucleotide
gcagctcccttgatcgcgtcaagtcggcta

SEQ ID NO: 509835 - DNA, 30 bp, Artificial Sequence
  Synthetic oligonucleotide
aatgtccccggcatgtgaccgcgcgggcta

SEQ ID NO: 509836 - DNA, 30 bp, Artificial Sequence
  Synthetic oligonucleotide
cacccgccgaacagcaaatccgtcgggcta

SEQ ID NO: 509837 - DNA, 30 bp, Artificial Sequence
  Synthetic oligonucleotide
ataaacgaaaatggatgtgtcgcggggcta

SEQ ID NO: 509838 - DNA, 30 bp, Artificial Sequence
  Synthetic oligonucleotide
gaggttaacggtcgaccctaccgctggcta

SEQ ID NO: 509839 - DNA, 30 bp, Artificial Sequence
  Synthetic oligonucleotide
ttttacgtcctccaaatttataagtggcta

SEQ ID NO: 509840 - DNA, 30 bp, Artificial Sequence
  Synthetic oligonucleotide
aagggcggatgaggcagctatttgtggcta

SEQ ID NO: 509841 - DNA, 30 bp, Artificial Sequence
  Synthetic oligonucleotide
gtttttctagagcgttctttacattggcta

SEQ ID NO: 509842 - DNA, 29 bp, Artificial Sequence
  Synthetic oligonucleotide
gctggtttatcagccttgtattttggcta

SEQ ID NO: 509843 - DNA, 30 bp, Artificial Sequence
  Synthetic oligonucleotide
tatctgtcaacgaagaaaaaatccatgcta

SEQ ID NO: 509844 - DNA, 30 bp, Artificial Sequence
  Synthetic oligonucleotide
ttgcgcaaaacaattactgtttagatgcta

SEQ ID NO: 509845 - DNA, 30 bp, Artificial Sequence
  Synthetic oligonucleotide
catatcatttgattatgatctcggatgcta

SEQ ID NO: 509846 - DNA, 30 bp, Artificial Sequence
  Synthetic oligonucleotide
tgatgcagcgcccggtgttttggtatgcta

SEQ ID NO: 509847 - DNA, 30 bp, Artificial Sequence
  Synthetic oligonucleotide
atttccatttgcgatatctactgtatgcta

SEQ ID NO: 509848 - DNA, 30 bp, Artificial Sequence
  Synthetic oligonucleotide
aagctagcatcgcatcctttcattatgcta

SEQ ID NO: 509849 - DNA, 30 bp, Artificial Sequence
  Synthetic oligonucleotide
agatacgcggctctcatgtttgttatgcta

SEQ ID NO: 509850 - DNA, 30 bp, Artificial Sequence
  Synthetic oligonucleotide
cggtgctttgaacattcaggtaaactgcta

SEQ ID NO: 509851 - DNA, 30 bp, Artificial Sequence
  Synthetic oligonucleotide
tccgcaacatcgcacgacccagatctgcta

SEQ ID NO: 509852 - DNA, 30 bp, Artificial Sequence
  Synthetic oligonucleotide
ccgcggcgttaatagccgtttaaagtgcta

SEQ ID NO: 509853 - DNA, 30 bp, Artificial Sequence
  Synthetic oligonucleotide
gatttacttactgataatcggacagtgcta

SEQ ID NO: 509854 - DNA, 30 bp, Artificial Sequence
  Synthetic oligonucleotide
gaaagcccctcagcaaaggggcaggtgcta

SEQ ID NO: 509855 - DNA, 30 bp, Artificial Sequence
  Synthetic oligonucleotide
cgtcagtgtgcagcgaatatttcggtgcta

SEQ ID NO: 509856 - DNA, 30 bp, Artificial Sequence
  Synthetic oligonucleotide
cttagatgttcagcacgcggaactgtgcta

SEQ ID NO: 509857 - DNA, 30 bp, Artificial Sequence
  Synthetic oligonucleotide
caggcacaaaggttactgacacttgtgcta

SEQ ID NO: 509858 - DNA, 30 bp, Artificial Sequence
  Synthetic oligonucleotide
ttacttagcgccactgaacgagcattgcta

SEQ ID NO: 509859 - DNA, 30 bp, Artificial Sequence
  Synthetic oligonucleotide
aatttaatttgggtactgtacgcattgcta

SEQ ID NO: 509860 - DNA, 30 bp, Artificial Sequence
  Synthetic oligonucleotide
gacccactgtaatatttacacggattgcta

SEQ ID NO: 509861 - DNA, 30 bp, Artificial Sequence
  Synthetic oligonucleotide
cagttactgtaccgaattggactattgcta

SEQ ID NO: 509862 - DNA, 30 bp, Artificial Sequence
  Synthetic oligonucleotide
ctattttatgtattccccattctattgcta

SEQ ID NO: 509863 - DNA, 30 bp, Artificial Sequence
  Synthetic oligonucleotide
gaaatttttattggtacccacgagttgcta

SEQ ID NO: 509864 - DNA, 30 bp, Artificial Sequence
  Synthetic oligonucleotide
caggcggccaaagtggttattgatttgcta

SEQ ID NO: 509865 - DNA, 30 bp, Artificial Sequence
  Synthetic oligonucleotide
ctctatacctaagcaccatttggtttgcta

SEQ ID NO: 509866 - DNA, 30 bp, Artificial Sequence
  Synthetic oligonucleotide
agtgcacaagtttcgcttttgattttgcta

SEQ ID NO: 509867 - DNA, 30 bp, Artificial Sequence
  Synthetic oligonucleotide
cattatatctgtaccggtctacagaatcta

SEQ ID NO: 509868 - DNA, 30 bp, Artificial Sequence
  Synthetic oligonucleotide
aagctcatgtcattgggcgagtagaatcta

SEQ ID NO: 509869 - DNA, 30 bp, Artificial Sequence
  Synthetic oligonucleotide
gcctattatttactctggatatataatcta

SEQ ID NO: 509870 - DNA, 30 bp, Artificial Sequence
  Synthetic oligonucleotide
acctattaagttcttggaatagttaatcta

SEQ ID NO: 509871 - DNA, 30 bp, Artificial Sequence
  Synthetic oligonucleotide
atgtgtttgcttgggcgacgcttacatcta

SEQ ID NO: 509872 - DNA, 30 bp, Artificial Sequence
  Synthetic oligonucleotide
ggcttttcattacatctccctgaccatcta

SEQ ID NO: 509873 - DNA, 30 bp, Artificial Sequence
  Synthetic oligonucleotide
acacgggaaaaacgacacgctggccatcta

SEQ ID NO: 509874 - DNA, 30 bp, Artificial Sequence
  Synthetic oligonucleotide
aaccgacattcatctatcgaatcgcatcta

SEQ ID NO: 509875 - DNA, 30 bp, Artificial Sequence
  Synthetic oligonucleotide
caccccgcataaggccgtagtatgcatcta

SEQ ID NO: 509876 - DNA, 30 bp, Artificial Sequence
  Synthetic oligonucleotide
acaaatcttggtttacagatgatagatcta

SEQ ID NO: 509877 - DNA, 30 bp, Artificial Sequence
  Synthetic oligonucleotide
gttcacaagcagtgaatacaaaacgatcta

SEQ ID NO: 509878 - DNA, 30 bp, Artificial Sequence
  Synthetic oligonucleotide
attattgttatggaggtccgagaggatcta

SEQ ID NO: 509879 - DNA, 30 bp, Artificial Sequence
  Synthetic oligonucleotide
acacccgtcatgcgcgtcgattttgatcta

SEQ ID NO: 509880 - DNA, 30 bp, Artificial Sequence
  Synthetic oligonucleotide
accaagtctggaatattgtttatctatcta

SEQ ID NO: 509881 - DNA, 30 bp, Artificial Sequence
  Synthetic oligonucleotide
ggagatagctacttgcttacagcgtatcta

SEQ ID NO: 509882 - DNA, 30 bp, Artificial Sequence
  Synthetic oligonucleotide
tggagacatcgaatagacgcttaaactcta

SEQ ID NO: 509883 - DNA, 30 bp, Artificial Sequence
  Synthetic oligonucleotide
tccaaatatttatccttgtcaccaactcta

SEQ ID NO: 509884 - DNA, 30 bp, Artificial Sequence
  Synthetic oligonucleotide
cgggctccagagccagtacgcagaactcta

SEQ ID NO: 509885 - DNA, 30 bp, Artificial Sequence
  Synthetic oligonucleotide
ttctctgcgcaccgtggtactataactcta

SEQ ID NO: 509886 - DNA, 30 bp, Artificial Sequence
  Synthetic oligonucleotide
atcttgtattaatatgatgttataactcta

SEQ ID NO: 509887 - DNA, 30 bp, Artificial Sequence
  Synthetic oligonucleotide
aattcgaaaatttcttcgaaacgcactcta

SEQ ID NO: 509888 - DNA, 30 bp, Artificial Sequence
  Synthetic oligonucleotide
ctgggagtacagatatatacttctactcta

SEQ ID NO: 509889 - DNA, 30 bp, Artificial Sequence
  Synthetic oligonucleotide
gattcaagggaaactatttcatgtactcta

SEQ ID NO: 509890 - DNA, 30 bp, Artificial Sequence
  Synthetic oligonucleotide
cccactaaaggagcgaggtgggaacctcta

SEQ ID NO: 509891 - DNA, 30 bp, Artificial Sequence
  Synthetic oligonucleotide
ctatttgcattacggacgttaggccctcta

SEQ ID NO: 509892 - DNA, 30 bp, Artificial Sequence
  Synthetic oligonucleotide
tattcaatggcacgttgtagttggcctcta

SEQ ID NO: 509893 - DNA, 30 bp, Artificial Sequence
  Synthetic oligonucleotide
atgccggcagcaagctcagagcgtcctcta

SEQ ID NO: 509894 - DNA, 30 bp, Artificial Sequence
  Synthetic oligonucleotide
tgttcctccctgatggttatccgagctcta

SEQ ID NO: 509895 - DNA, 30 bp, Artificial Sequence
  Synthetic oligonucleotide
tattcatctggcggcggactgttcgctcta

SEQ ID NO: 509896 - DNA, 30 bp, Artificial Sequence
  Synthetic oligonucleotide
atctaagccactcgctgcaagggggctcta

SEQ ID NO: 509897 - DNA, 30 bp, Artificial Sequence
  Synthetic oligonucleotide
ggtacttgccataatggagatgctgctcta

SEQ ID NO: 509898 - DNA, 30 bp, Artificial Sequence
  Synthetic oligonucleotide
gaccctttccatgaccagaccagtgctcta

SEQ ID NO: 509899 - DNA, 30 bp, Artificial Sequence
  Synthetic oligonucleotide
ggagccccccctttcataggatgctctcta

SEQ ID NO: 509900 - DNA, 30 bp, Artificial Sequence
  Synthetic oligonucleotide
attcgcagcgagagttaagtttcgtctcta

SEQ ID NO: 509901 - DNA, 30 bp, Artificial Sequence
  Synthetic oligonucleotide
gtcgcgttttatgagacactcaggtctcta

SEQ ID NO: 509902 - DNA, 30 bp, Artificial Sequence
  Synthetic oligonucleotide
tgttgtaggcgcgcagcacactggtctcta

SEQ ID NO: 509903 - DNA, 30 bp, Artificial Sequence
  Synthetic oligonucleotide
atcgttccgtgctgcggagaatattctcta

SEQ ID NO: 509904 - DNA, 30 bp, Artificial Sequence
  Synthetic oligonucleotide
tgatttttagacgttatactctattctcta

SEQ ID NO: 509905 - DNA, 30 bp, Artificial Sequence
  Synthetic oligonucleotide
ctactagtattggtgacaattcgaagtcta

SEQ ID NO: 509906 - DNA, 30 bp, Artificial Sequence
  Synthetic oligonucleotide
gacgcagatcgagatgatccaggcagtcta

SEQ ID NO: 509907 - DNA, 30 bp, Artificial Sequence
  Synthetic oligonucleotide
actggggtaacagataagacatggagtcta

SEQ ID NO: 509908 - DNA, 30 bp, Artificial Sequence
  Synthetic oligonucleotide
ggaatgaacgaacacatagtcgttagtcta

SEQ ID NO: 509909 - DNA, 30 bp, Artificial Sequence
  Synthetic oligonucleotide
atcacatgtacctaaagagtaccccgtcta

SEQ ID NO: 509910 - DNA, 30 bp, Artificial Sequence
  Synthetic oligonucleotide
aaccacttttgcagtaactttaggcgtcta

SEQ ID NO: 509911 - DNA, 30 bp, Artificial Sequence
  Synthetic oligonucleotide
cagagcggctcgatgctaccgcgaggtcta

SEQ ID NO: 509912 - DNA, 30 bp, Artificial Sequence
  Synthetic oligonucleotide
cgtccccaaccgcggggccccgtaggtcta

SEQ ID NO: 509913 - DNA, 30 bp, Artificial Sequence
  Synthetic oligonucleotide
gggcgtgagcaaagaatcactttaggtcta

SEQ ID NO: 509914 - DNA, 30 bp, Artificial Sequence
  Synthetic oligonucleotide
aaatagacaaagttcttttatttgggtcta

SEQ ID NO: 509915 - DNA, 30 bp, Artificial Sequence
  Synthetic oligonucleotide
accgcggagtcgatctcggactctggtcta

SEQ ID NO: 509916 - DNA, 30 bp, Artificial Sequence
  Synthetic oligonucleotide
agaatggggctttacctttggcttggtcta

SEQ ID NO: 509917 - DNA, 30 bp, Artificial Sequence
  Synthetic oligonucleotide
gatatagtttagcgtacaacaggatgtcta

SEQ ID NO: 509918 - DNA, 30 bp, Artificial Sequence
  Synthetic oligonucleotide
acgcagttccgggataccatatcctgtcta

SEQ ID NO: 509919 - DNA, 30 bp, Artificial Sequence
  Synthetic oligonucleotide
tagtgcgttgacgtgctcttgaagtgtcta

SEQ ID NO: 509920 - DNA, 30 bp, Artificial Sequence
  Synthetic oligonucleotide
gacagtgccgcatcaaacttacgaattcta

SEQ ID NO: 509921 - DNA, 30 bp, Artificial Sequence
  Synthetic oligonucleotide
ccggtgggagagatgaacgtattaattcta

SEQ ID NO: 509922 - DNA, 30 bp, Artificial Sequence
  Synthetic oligonucleotide
gatctccgccgtcacgcatagttaattcta

SEQ ID NO: 509923 - DNA, 30 bp, Artificial Sequence
  Synthetic oligonucleotide
acctctcgacgttataagaggtacattcta

SEQ ID NO: 509924 - DNA, 30 bp, Artificial Sequence
  Synthetic oligonucleotide
aaaatgatacgttctatgtagcgcattcta

SEQ ID NO: 509925 - DNA, 30 bp, Artificial Sequence
  Synthetic oligonucleotide
gtataacagttgccgcatacgctcattcta

SEQ ID NO: 509926 - DNA, 30 bp, Artificial Sequence
  Synthetic oligonucleotide
gtagatggggccaaagtactgacgattcta

SEQ ID NO: 509927 - DNA, 30 bp, Artificial Sequence
  Synthetic oligonucleotide
acaatgggttaaattccggcagcgattcta

SEQ ID NO: 509928 - DNA, 30 bp, Artificial Sequence
  Synthetic oligonucleotide
gcactctacccacgacatcgggggattcta

SEQ ID NO: 509929 - DNA, 30 bp, Artificial Sequence
  Synthetic oligonucleotide
gagtactctcgccaatatagaaatattcta

SEQ ID NO: 509930 - DNA, 30 bp, Artificial Sequence
  Synthetic oligonucleotide
tacaaccaaaaatggtattgttctattcta

SEQ ID NO: 509931 - DNA, 30 bp, Artificial Sequence
  Synthetic oligonucleotide
taatcgagcttatcgccgtttattattcta

SEQ ID NO: 509932 - DNA, 30 bp, Artificial Sequence
  Synthetic oligonucleotide
atggtcctaaggcggcacgtgtgacttcta

SEQ ID NO: 509933 - DNA, 30 bp, Artificial Sequence
  Synthetic oligonucleotide
aaatatacaaagaatttccggaaccttcta

SEQ ID NO: 509934 - DNA, 30 bp, Artificial Sequence
  Synthetic oligonucleotide
aataggggcgtgtacgttcaacgtcttcta

SEQ ID NO: 509935 - DNA, 30 bp, Artificial Sequence
  Synthetic oligonucleotide
tccaaagatcctgtctcaccgaaagttcta

SEQ ID NO: 509936 - DNA, 30 bp, Artificial Sequence
  Synthetic oligonucleotide
ggtaatgcctcctcatgacatctcgttcta

SEQ ID NO: 509937 - DNA, 30 bp, Artificial Sequence
  Synthetic oligonucleotide
attattaccgtgacttgacaggaatttcta

SEQ ID NO: 509938 - DNA, 30 bp, Artificial Sequence
  Synthetic oligonucleotide
ctaaatttttatacgatgattgcatttcta

SEQ ID NO: 509939 - DNA, 30 bp, Artificial Sequence
  Synthetic oligonucleotide
gccctgtgacagagcggtcactcatttcta

SEQ ID NO: 509940 - DNA, 30 bp, Artificial Sequence
  Synthetic oligonucleotide
tacgcgccacaatctctacaaagatttcta

SEQ ID NO: 509941 - DNA, 30 bp, Artificial Sequence
  Synthetic oligonucleotide
acagttatttacacacacggtacgtttcta

SEQ ID NO: 509942 - DNA, 30 bp, Artificial Sequence
  Synthetic oligonucleotide
tgctgacatcttaggtaataggcgtttcta

SEQ ID NO: 509943 - DNA, 30 bp, Artificial Sequence
  Synthetic oligonucleotide
aatggaagctgttgacctctatcgtttcta

SEQ ID NO: 509944 - DNA, 30 bp, Artificial Sequence
  Synthetic oligonucleotide
aagcaccatcaattgcggcttcggtttcta

SEQ ID NO: 509945 - DNA, 30 bp, Artificial Sequence
  Synthetic oligonucleotide
ctcttaatgataagttggtctcattttcta

SEQ ID NO: 509946 - DNA, 30 bp, Artificial Sequence
  Synthetic oligonucleotide
cccccctctgtctcttttttctcttttcta

SEQ ID NO: 509947 - DNA, 30 bp, Artificial Sequence
  Synthetic oligonucleotide
gagatcagcgacgcatctaaggtttttcta

SEQ ID NO: 509948 - DNA, 30 bp, Artificial Sequence
  Synthetic oligonucleotide
ttactatgcatccccgttgacgcaaaagta

SEQ ID NO: 509949 - DNA, 30 bp, Artificial Sequence
  Synthetic oligonucleotide
caccagtattttttaccgaccggaaaagta

SEQ ID NO: 509950 - DNA, 30 bp, Artificial Sequence
  Synthetic oligonucleotide
ggttgagctggacgacgccaggtaaaagta

SEQ ID NO: 509951 - DNA, 30 bp, Artificial Sequence
  Synthetic oligonucleotide
gagtctgttctatcccgctacatcaaagta

SEQ ID NO: 509952 - DNA, 30 bp, Artificial Sequence
  Synthetic oligonucleotide
agggagaacgctagacagggtctcaaagta

SEQ ID NO: 509953 - DNA, 30 bp, Artificial Sequence
  Synthetic oligonucleotide
ctacagtggaccctatgtgtagtcaaagta

SEQ ID NO: 509954 - DNA, 30 bp, Artificial Sequence
  Synthetic oligonucleotide
cagcatccgcagatagttttattcaaagta

SEQ ID NO: 509955 - DNA, 30 bp, Artificial Sequence
  Synthetic oligonucleotide
gagatcacaaccttaaacagtgagaaagta

SEQ ID NO: 509956 - DNA, 30 bp, Artificial Sequence
  Synthetic oligonucleotide
ttagccgtccgcatttctctttggaaagta

SEQ ID NO: 509957 - DNA, 30 bp, Artificial Sequence
  Synthetic oligonucleotide
tacgaaggttccttgccatgttataaagta

SEQ ID NO: 509958 - DNA, 30 bp, Artificial Sequence
  Synthetic oligonucleotide
gaaatttaggaggattgaggccgtaaagta

SEQ ID NO: 509959 - DNA, 30 bp, Artificial Sequence
  Synthetic oligonucleotide
cccgtgaaataacgtcataagcttaaagta

SEQ ID NO: 509960 - DNA, 30 bp, Artificial Sequence
  Synthetic oligonucleotide
cagccgcgaatggctgcacgcgcacaagta

SEQ ID NO: 509961 - DNA, 30 bp, Artificial Sequence
  Synthetic oligonucleotide
gacgtctagttttgtaggtgtagccaagta

SEQ ID NO: 509962 - DNA, 30 bp, Artificial Sequence
  Synthetic oligonucleotide
gatcggtgtagcgaggaggaaattcaagta

SEQ ID NO: 509963 - DNA, 30 bp, Artificial Sequence
  Synthetic oligonucleotide
gctgatcgtagcattacagtcacagaagta

SEQ ID NO: 509964 - DNA, 30 bp, Artificial Sequence
  Synthetic oligonucleotide
tataattcccgttttccaataagagaagta

SEQ ID NO: 509965 - DNA, 30 bp, Artificial Sequence
  Synthetic oligonucleotide
gcccgcttgggcctagactcgttagaagta

SEQ ID NO: 509966 - DNA, 30 bp, Artificial Sequence
  Synthetic oligonucleotide
accggtgtccgcagcaagcgacaggaagta

SEQ ID NO: 509967 - DNA, 30 bp, Artificial Sequence
  Synthetic oligonucleotide
cggctcttcctttcacgtacatcggaagta

SEQ ID NO: 509968 - DNA, 30 bp, Artificial Sequence
  Synthetic oligonucleotide
cgcggctcatgatgacggtctcgggaagta

SEQ ID NO: 509969 - DNA, 30 bp, Artificial Sequence
  Synthetic oligonucleotide
gggtgaaatagggcagctggaaatgaagta

SEQ ID NO: 509970 - DNA, 30 bp, Artificial Sequence
  Synthetic oligonucleotide
gatttcccatagcgttcttttaatgaagta

SEQ ID NO: 509971 - DNA, 30 bp, Artificial Sequence
  Synthetic oligonucleotide
cctgactcagtacggacagagtcataagta

SEQ ID NO: 509972 - DNA, 30 bp, Artificial Sequence
  Synthetic oligonucleotide
gaggtgcctatactggtctgttcataagta

SEQ ID NO: 509973 - DNA, 30 bp, Artificial Sequence
  Synthetic oligonucleotide
gatttcatgagaccttaggctatataagta

SEQ ID NO: 509974 - DNA, 30 bp, Artificial Sequence
  Synthetic oligonucleotide
tcttctttcgcagaccagcctgcctaagta

SEQ ID NO: 509975 - DNA, 30 bp, Artificial Sequence
  Synthetic oligonucleotide
cggcacgagttaaaggagcagaaaacagta

SEQ ID NO: 509976 - DNA, 30 bp, Artificial Sequence
  Synthetic oligonucleotide
gaaatcgtaggctccaaaacagtaacagta

SEQ ID NO: 509977 - DNA, 30 bp, Artificial Sequence
  Synthetic oligonucleotide
ccggccaatcctgtataatagttcacagta

SEQ ID NO: 509978 - DNA, 30 bp, Artificial Sequence
  Synthetic oligonucleotide
aaggaggagtcctcgaagactttcacagta

SEQ ID NO: 509979 - DNA, 30 bp, Artificial Sequence
  Synthetic oligonucleotide
tatcttttagatagggttattaagacagta

SEQ ID NO: 509980 - DNA, 30 bp, Artificial Sequence
  Synthetic oligonucleotide
gttactattgggtaaagccaattcccagta

SEQ ID NO: 509981 - DNA, 30 bp, Artificial Sequence
  Synthetic oligonucleotide
tccactggactaatcttcccacggccagta

SEQ ID NO: 509982 - DNA, 30 bp, Artificial Sequence
  Synthetic oligonucleotide
atgtgagaccagaactccggcaaagcagta

SEQ ID NO: 509983 - DNA, 30 bp, Artificial Sequence
  Synthetic oligonucleotide
gtgttccggaaatctttagactcagcagta

SEQ ID NO: 509984 - DNA, 30 bp, Artificial Sequence
  Synthetic oligonucleotide
gcgacgccaagctgctgccactgagcagta

SEQ ID NO: 509985 - DNA, 30 bp, Artificial Sequence
  Synthetic oligonucleotide
ttgagaagtgactcttctcacaacgcagta

SEQ ID NO: 509986 - DNA, 30 bp, Artificial Sequence
  Synthetic oligonucleotide
aatagggagggtctactgcgctacgcagta

SEQ ID NO: 509987 - DNA, 30 bp, Artificial Sequence
  Synthetic oligonucleotide
acaagtgtcctgcagctaactagggcagta

SEQ ID NO: 509988 - DNA, 30 bp, Artificial Sequence
  Synthetic oligonucleotide
ttgggtttgtgctttcgttgggtggcagta

SEQ ID NO: 509989 - DNA, 30 bp, Artificial Sequence
  Synthetic oligonucleotide
tggtccctgggggagcgtcgggatgcagta

SEQ ID NO: 509990 - DNA, 30 bp, Artificial Sequence
  Synthetic oligonucleotide
gaccgtctacattatctttcatatgcagta

SEQ ID NO: 509991 - DNA, 30 bp, Artificial Sequence
  Synthetic oligonucleotide
taagaaccgcaaagtacaatctatgcagta

SEQ ID NO: 509992 - DNA, 30 bp, Artificial Sequence
  Synthetic oligonucleotide
accatagtgcaccggaagcgcggtgcagta

SEQ ID NO: 509993 - DNA, 30 bp, Artificial Sequence
  Synthetic oligonucleotide
atttgatggcagtcactgaacgttgcagta

SEQ ID NO: 509994 - DNA, 30 bp, Artificial Sequence
  Synthetic oligonucleotide
aacagacaagcgaacagcaatgcatcagta

SEQ ID NO: 509995 - DNA, 30 bp, Artificial Sequence
  Synthetic oligonucleotide
aaattaagactgggtattgacgactcagta

SEQ ID NO: 509996 - DNA, 30 bp, Artificial Sequence
  Synthetic oligonucleotide
tgtttgtgcactagcctggtctattcagta

SEQ ID NO: 509997 - DNA, 30 bp, Artificial Sequence
  Synthetic oligonucleotide
catcgacgtaaaatcagaaaggcaagagta

SEQ ID NO: 509998 - DNA, 30 bp, Artificial Sequence
  Synthetic oligonucleotide
tggcgtgattgcatgtgctacaagagagta

SEQ ID NO: 509999 - DNA, 30 bp, Artificial Sequence
  Synthetic oligonucleotide
gtatcgaggtctgcgctacgcacgagagta

SEQ ID NO: 510000 - DNA, 30 bp, Artificial Sequence
  Synthetic oligonucleotide
cttaggggacatctgtgggcttttagagta

SEQ ID NO: 510001 - DNA, 30 bp, Artificial Sequence
  Synthetic oligonucleotide
gggaaggttgagacactctcatgacgagta

SEQ ID NO: 510002 - DNA, 30 bp, Artificial Sequence
  Synthetic oligonucleotide
gctaattgcaacatagggtgaaaccgagta

SEQ ID NO: 510003 - DNA, 30 bp, Artificial Sequence
  Synthetic oligonucleotide
attacttcaaaaattagttaatgccgagta

SEQ ID NO: 510004 - DNA, 30 bp, Artificial Sequence
  Synthetic oligonucleotide
gctccgagcaaccacattaggaagcgagta

SEQ ID NO: 510005 - DNA, 30 bp, Artificial Sequence
  Synthetic oligonucleotide
ttacaagagtgaggagagaagtagcgagta

SEQ ID NO: 510006 - DNA, 30 bp, Artificial Sequence
  Synthetic oligonucleotide
gaaatcacctttaagaccttcgctcgagta

SEQ ID NO: 510007 - DNA, 30 bp, Artificial Sequence
  Synthetic oligonucleotide
ggctgcgaaggaacacatattacaggagta

SEQ ID NO: 510008 - DNA, 30 bp, Artificial Sequence
  Synthetic oligonucleotide
aaggcaacaaaaggcatgagttcaggagta

SEQ ID NO: 510009 - DNA, 30 bp, Artificial Sequence
  Synthetic oligonucleotide
gttctttgttctgcgggagctcctggagta

SEQ ID NO: 510010 - DNA, 30 bp, Artificial Sequence
  Synthetic oligonucleotide
aaagtgttcgctgttgcagaatgtggagta

SEQ ID NO: 510011 - DNA, 30 bp, Artificial Sequence
  Synthetic oligonucleotide
ctgactccaacaggatcgtcgttgtgagta

SEQ ID NO: 510012 - DNA, 30 bp, Artificial Sequence
  Synthetic oligonucleotide
ttgatgtgccgtaaatagtaacgttgagta

SEQ ID NO: 510013 - DNA, 30 bp, Artificial Sequence
  Synthetic oligonucleotide
tatcccgcaccagtttaccacttttgagta

SEQ ID NO: 510014 - DNA, 30 bp, Artificial Sequence
  Synthetic oligonucleotide
gggcattgttttggtttacgcttttgagta

SEQ ID NO: 510015 - DNA, 30 bp, Artificial Sequence
  Synthetic oligonucleotide
taaagctatacgtgggcagggccaatagta

SEQ ID NO: 510016 - DNA, 30 bp, Artificial Sequence
  Synthetic oligonucleotide
gtaactatgtgcaccgacgcactaatagta

SEQ ID NO: 510017 - DNA, 30 bp, Artificial Sequence
  Synthetic oligonucleotide
atgccgccagcgacatacgcttctatagta

SEQ ID NO: 510018 - DNA, 30 bp, Artificial Sequence
  Synthetic oligonucleotide
ggcgtctgtacccacgtgaggggtatagta

SEQ ID NO: 510019 - DNA, 30 bp, Artificial Sequence
  Synthetic oligonucleotide
ccatcgctcattcttgcccgctgactagta

SEQ ID NO: 510020 - DNA, 30 bp, Artificial Sequence
  Synthetic oligonucleotide
atttgttgaacgacaatatataagctagta

SEQ ID NO: 510021 - DNA, 30 bp, Artificial Sequence
  Synthetic oligonucleotide
atctttcacagattctgggagttgctagta

SEQ ID NO: 510022 - DNA, 30 bp, Artificial Sequence
  Synthetic oligonucleotide
tgcagaatttagactatggctcatctagta

SEQ ID NO: 510023 - DNA, 30 bp, Artificial Sequence
  Synthetic oligonucleotide
cggaaccagagtatcggtacaaacgtagta

SEQ ID NO: 510024 - DNA, 30 bp, Artificial Sequence
  Synthetic oligonucleotide
ggctactaccccttagggatagtcgtagta

SEQ ID NO: 510025 - DNA, 30 bp, Artificial Sequence
  Synthetic oligonucleotide
tctctaggggcagattcgtttgaggtagta

SEQ ID NO: 510026 - DNA, 30 bp, Artificial Sequence
  Synthetic oligonucleotide
aaattggtgcaatgtggcaactcggtagta

SEQ ID NO: 510027 - DNA, 30 bp, Artificial Sequence
  Synthetic oligonucleotide
gtacagcgattaccgcagacccttgtagta

SEQ ID NO: 510028 - DNA, 30 bp, Artificial Sequence
  Synthetic oligonucleotide
gggtgtgagtagcagacatacaaattagta

SEQ ID NO: 510029 - DNA, 30 bp, Artificial Sequence
  Synthetic oligonucleotide
acgtcccggggggtgcctcatgcattagta

SEQ ID NO: 510030 - DNA, 30 bp, Artificial Sequence
  Synthetic oligonucleotide
taggcccaccatgatatatccctattagta

SEQ ID NO: 510031 - DNA, 30 bp, Artificial Sequence
  Synthetic oligonucleotide
aatagactgagagggaggcatctattagta

SEQ ID NO: 510032 - DNA, 30 bp, Artificial Sequence
  Synthetic oligonucleotide
acagatccagaaccttactgcccgttagta

SEQ ID NO: 510033 - DNA, 30 bp, Artificial Sequence
  Synthetic oligonucleotide
tgtcccggccttgcttcactgatgttagta

SEQ ID NO: 510034 - DNA, 30 bp, Artificial Sequence
  Synthetic oligonucleotide
catttcctaaactcgtcttaggttttagta

SEQ ID NO: 510035 - DNA, 30 bp, Artificial Sequence
  Synthetic oligonucleotide
gatttcgacacggacgggctaaggaacgta

SEQ ID NO: 510036 - DNA, 30 bp, Artificial Sequence
  Synthetic oligonucleotide
accccctgtgttctagggtttagacacgta

SEQ ID NO: 510037 - DNA, 30 bp, Artificial Sequence
  Synthetic oligonucleotide
cccacttactgttcgataggtttacacgta

SEQ ID NO: 510038 - DNA, 30 bp, Artificial Sequence
  Synthetic oligonucleotide
ttatgtacagtctttcgttaacaccacgta

SEQ ID NO: 510039 - DNA, 30 bp, Artificial Sequence
  Synthetic oligonucleotide
tccccgagacgcttgtgctaaatccacgta

SEQ ID NO: 510040 - DNA, 30 bp, Artificial Sequence
  Synthetic oligonucleotide
gaggggaacctcaccgtggccctccacgta

SEQ ID NO: 510041 - DNA, 30 bp, Artificial Sequence
  Synthetic oligonucleotide
ccgggctctagcgaccactagacgcacgta

SEQ ID NO: 510042 - DNA, 30 bp, Artificial Sequence
  Synthetic oligonucleotide
tactatttttagagcccatgacggcacgta

SEQ ID NO: 510043 - DNA, 30 bp, Artificial Sequence
  Synthetic oligonucleotide
taacatatacggttaaacgctattcacgta

SEQ ID NO: 510044 - DNA, 30 bp, Artificial Sequence
  Synthetic oligonucleotide
gattcgatctcaagagctcgacaagacgta

SEQ ID NO: 510045 - DNA, 30 bp, Artificial Sequence
  Synthetic oligonucleotide
tagaagtgttggaagatcgtacgagacgta

SEQ ID NO: 510046 - DNA, 30 bp, Artificial Sequence
  Synthetic oligonucleotide
tatctacgcagtggccgttagcgagacgta

SEQ ID NO: 510047 - DNA, 30 bp, Artificial Sequence
  Synthetic oligonucleotide
gttttatcagcatcccggtccatagacgta

SEQ ID NO: 510048 - DNA, 30 bp, Artificial Sequence
  Synthetic oligonucleotide
gcgaggccaacgttaattagtatagacgta

SEQ ID NO: 510049 - DNA, 30 bp, Artificial Sequence
  Synthetic oligonucleotide
ccttcgaacatctccggccgagtagacgta

SEQ ID NO: 510050 - DNA, 30 bp, Artificial Sequence
  Synthetic oligonucleotide
atgatgttcaagctcacgtctaaggacgta

SEQ ID NO: 510051 - DNA, 30 bp, Artificial Sequence
  Synthetic oligonucleotide
atgttgggtgtggcatactcggcctacgta

SEQ ID NO: 510052 - DNA, 30 bp, Artificial Sequence
  Synthetic oligonucleotide
tttgcaacgttgcaatatcgctagtacgta

SEQ ID NO: 510053 - DNA, 30 bp, Artificial Sequence
  Synthetic oligonucleotide
agtacatctgtcgatgtccagacgtacgta

SEQ ID NO: 510054 - DNA, 30 bp, Artificial Sequence
  Synthetic oligonucleotide
tgtatgctcgtacgggtttccgcgtacgta

SEQ ID NO: 510055 - DNA, 30 bp, Artificial Sequence
  Synthetic oligonucleotide
acccatgtacgagtagtcgggggttacgta

SEQ ID NO: 510056 - DNA, 30 bp, Artificial Sequence
  Synthetic oligonucleotide
gtcctctcacgcaccatgatcgaaaccgta

SEQ ID NO: 510057 - DNA, 30 bp, Artificial Sequence
  Synthetic oligonucleotide
tacttggtcaagccgtagatgtacaccgta

SEQ ID NO: 510058 - DNA, 30 bp, Artificial Sequence
  Synthetic oligonucleotide
gctagctaggggtgtcgaagttgcaccgta

SEQ ID NO: 510059 - DNA, 30 bp, Artificial Sequence
  Synthetic oligonucleotide
tataatcatttgtagactttcaagaccgta

SEQ ID NO: 510060 - DNA, 30 bp, Artificial Sequence
  Synthetic oligonucleotide
tgaacagctcgactccgcacgcataccgta

SEQ ID NO: 510061 - DNA, 30 bp, Artificial Sequence
  Synthetic oligonucleotide
ggcgaaacggttatcgtttcccctaccgta

SEQ ID NO: 510062 - DNA, 29 bp, Artificial Sequence
  Synthetic oligonucleotide
aaatgccgacctgaaaaaaaaaacccgta

SEQ ID NO: 510063 - DNA, 30 bp, Artificial Sequence
  Synthetic oligonucleotide
gaataattaaccgtggtccatttacccgta

SEQ ID NO: 510064 - DNA, 30 bp, Artificial Sequence
  Synthetic oligonucleotide
ctgataagcaggtgcggtattgggcccgta

SEQ ID NO: 510065 - DNA, 30 bp, Artificial Sequence
  Synthetic oligonucleotide
aaaaagtccgctgtcgtacggaatcccgta

SEQ ID NO: 510066 - DNA, 30 bp, Artificial Sequence
  Synthetic oligonucleotide
tggcacacggcatacgggcctaaagccgta

SEQ ID NO: 510067 - DNA, 30 bp, Artificial Sequence
  Synthetic oligonucleotide
atctacttcttaacatgtgtcaccgccgta

SEQ ID NO: 510068 - DNA, 30 bp, Artificial Sequence
  Synthetic oligonucleotide
tagggccatctgatgagactccgcgccgta

SEQ ID NO: 510069 - DNA, 30 bp, Artificial Sequence
  Synthetic oligonucleotide
ggagtatctagcaaacttacttgcgccgta

SEQ ID NO: 510070 - DNA, 30 bp, Artificial Sequence
  Synthetic oligonucleotide
gagattctactgttatttggcctggccgta

SEQ ID NO: 510071 - DNA, 30 bp, Artificial Sequence
  Synthetic oligonucleotide
ctggacgtacaaaaatgggaccagtccgta

SEQ ID NO: 510072 - DNA, 30 bp, Artificial Sequence
  Synthetic oligonucleotide
gacgccccttcttttcgtcgcgggtccgta

SEQ ID NO: 510073 - DNA, 30 bp, Artificial Sequence
  Synthetic oligonucleotide
ctcacgatatttttattacaacccagcgta

SEQ ID NO: 510074 - DNA, 30 bp, Artificial Sequence
  Synthetic oligonucleotide
attatcgcttagctcaccaactccagcgta

SEQ ID NO: 510075 - DNA, 30 bp, Artificial Sequence
  Synthetic oligonucleotide
tcccaaaaccttgtagggaactgcagcgta

SEQ ID NO: 510076 - DNA, 30 bp, Artificial Sequence
  Synthetic oligonucleotide
gtattatactccacctctcgaaagagcgta

SEQ ID NO: 510077 - DNA, 30 bp, Artificial Sequence
  Synthetic oligonucleotide
gtagtgcctatgctcggtatgaggagcgta

SEQ ID NO: 510078 - DNA, 30 bp, Artificial Sequence
  Synthetic oligonucleotide
ttgctgactactacgctcgcatggagcgta

SEQ ID NO: 510079 - DNA, 30 bp, Artificial Sequence
  Synthetic oligonucleotide
gttagcactttattgactcgactgagcgta

SEQ ID NO: 510080 - DNA, 30 bp, Artificial Sequence
  Synthetic oligonucleotide
atttgcgggacatgaaatgcctctagcgta

SEQ ID NO: 510081 - DNA, 30 bp, Artificial Sequence
  Synthetic oligonucleotide
attgacttatgcgacgagacttcacgcgta

SEQ ID NO: 510082 - DNA, 30 bp, Artificial Sequence
  Synthetic oligonucleotide
cgggggctttgaacgacgcttgtacgcgta

SEQ ID NO: 510083 - DNA, 30 bp, Artificial Sequence
  Synthetic oligonucleotide
ttatatgccatgtttggtaagtttcgcgta

SEQ ID NO: 510084 - DNA, 30 bp, Artificial Sequence
  Synthetic oligonucleotide
caggctacacaggaaccgcaagagggcgta

SEQ ID NO: 510085 - DNA, 30 bp, Artificial Sequence
  Synthetic oligonucleotide
agctcttctcaggtcaggatagggggcgta

SEQ ID NO: 510086 - DNA, 30 bp, Artificial Sequence
  Synthetic oligonucleotide
tgattcttagtgtgtacaagaatgggcgta

SEQ ID NO: 510087 - DNA, 30 bp, Artificial Sequence
  Synthetic oligonucleotide
tagccgctacgggccgaatatatgggcgta

SEQ ID NO: 510088 - DNA, 30 bp, Artificial Sequence
  Synthetic oligonucleotide
aggtcacggttggggcgtttactgggcgta

SEQ ID NO: 510089 - DNA, 30 bp, Artificial Sequence
  Synthetic oligonucleotide
tcttaatatcatatgcctcagtttggcgta

SEQ ID NO: 510090 - DNA, 30 bp, Artificial Sequence
  Synthetic oligonucleotide
gacgtgtccgttaccttaccgagatgcgta

SEQ ID NO: 510091 - DNA, 30 bp, Artificial Sequence
  Synthetic oligonucleotide
ttggttgtactttttagcataccgtgcgta

SEQ ID NO: 510092 - DNA, 30 bp, Artificial Sequence
  Synthetic oligonucleotide
tttgacaaagtgggttcagacgattgcgta

SEQ ID NO: 510093 - DNA, 30 bp, Artificial Sequence
  Synthetic oligonucleotide
gagtgtcacctagacctgaagtcttgcgta

SEQ ID NO: 510094 - DNA, 30 bp, Artificial Sequence
  Synthetic oligonucleotide
acaacaccaagtcgttccatgcatatcgta

SEQ ID NO: 510095 - DNA, 30 bp, Artificial Sequence
  Synthetic oligonucleotide
aataacttcaaatacgtttgcgatatcgta

SEQ ID NO: 510096 - DNA, 30 bp, Artificial Sequence
  Synthetic oligonucleotide
aaatagggcaatcgactcaactatatcgta

SEQ ID NO: 510097 - DNA, 30 bp, Artificial Sequence
  Synthetic oligonucleotide
tctcgccctcggctaattggctatatcgta

SEQ ID NO: 510098 - DNA, 30 bp, Artificial Sequence
  Synthetic oligonucleotide
attgggataactatcccaaagcgtatcgta

SEQ ID NO: 510099 - DNA, 30 bp, Artificial Sequence
  Synthetic oligonucleotide
ggttaataagattatacccactgcctcgta

SEQ ID NO: 510100 - DNA, 30 bp, Artificial Sequence
  Synthetic oligonucleotide
taagtgctccataatgacacttagctcgta

SEQ ID NO: 510101 - DNA, 30 bp, Artificial Sequence
  Synthetic oligonucleotide
attccttagattatgcggatacaagtcgta

SEQ ID NO: 510102 - DNA, 30 bp, Artificial Sequence
  Synthetic oligonucleotide
aaccgacacgtgcattcgcgttaagtcgta

SEQ ID NO: 510103 - DNA, 30 bp, Artificial Sequence
  Synthetic oligonucleotide
aagacgcaggcatatgcactaggagtcgta

SEQ ID NO: 510104 - DNA, 30 bp, Artificial Sequence
  Synthetic oligonucleotide
ataaacactacgggagtgcatcccgtcgta

SEQ ID NO: 510105 - DNA, 30 bp, Artificial Sequence
  Synthetic oligonucleotide
agtaagcttcttcgctgtccatgcttcgta

SEQ ID NO: 510106 - DNA, 30 bp, Artificial Sequence
  Synthetic oligonucleotide
tgaaccgcccaccgcctctaactcttcgta

SEQ ID NO: 510107 - DNA, 30 bp, Artificial Sequence
  Synthetic oligonucleotide
ggaacccgtctggggatcttggttttcgta

SEQ ID NO: 510108 - DNA, 30 bp, Artificial Sequence
  Synthetic oligonucleotide
ggccagacccattagcctctagcaaaggta

SEQ ID NO: 510109 - DNA, 30 bp, Artificial Sequence
  Synthetic oligonucleotide
tgcaggctgagacacgatctacgaaaggta

SEQ ID NO: 510110 - DNA, 30 bp, Artificial Sequence
  Synthetic oligonucleotide
aactttactgttggccgcaaagtaaaggta

SEQ ID NO: 510111 - DNA, 30 bp, Artificial Sequence
  Synthetic oligonucleotide
tacacagtagaatttgccattagcaaggta

SEQ ID NO: 510112 - DNA, 30 bp, Artificial Sequence
  Synthetic oligonucleotide
acgtagagacgcggctcctctccgaaggta

SEQ ID NO: 510113 - DNA, 30 bp, Artificial Sequence
  Synthetic oligonucleotide
ccgggacaagggatcgcgaggctgaaggta

SEQ ID NO: 510114 - DNA, 30 bp, Artificial Sequence
  Synthetic oligonucleotide
actctattgggtaatttcctccgtaaggta

SEQ ID NO: 510115 - DNA, 30 bp, Artificial Sequence
  Synthetic oligonucleotide
gtacttgcagtttatttggtataacaggta

SEQ ID NO: 510116 - DNA, 30 bp, Artificial Sequence
  Synthetic oligonucleotide
cgttgtgagtgccgctatcataagcaggta

SEQ ID NO: 510117 - DNA, 30 bp, Artificial Sequence
  Synthetic oligonucleotide
caaactgggtggccgggcagtgagcaggta

SEQ ID NO: 510118 - DNA, 30 bp, Artificial Sequence
  Synthetic oligonucleotide
tgaggtccctacaagatttcccttcaggta

SEQ ID NO: 510119 - DNA, 30 bp, Artificial Sequence
  Synthetic oligonucleotide
cactgcccgcttaggaaaagtcgagaggta

SEQ ID NO: 510120 - DNA, 30 bp, Artificial Sequence
  Synthetic oligonucleotide
tctactcatatgccgcggtctggagaggta

SEQ ID NO: 510121 - DNA, 30 bp, Artificial Sequence
  Synthetic oligonucleotide
gcatactgataatggtgtttgctagaggta

SEQ ID NO: 510122 - DNA, 30 bp, Artificial Sequence
  Synthetic oligonucleotide
ttacacggggctgaaagctatctagaggta

SEQ ID NO: 510123 - DNA, 30 bp, Artificial Sequence
  Synthetic oligonucleotide
ggttttcttgccacgcgaattttagaggta

SEQ ID NO: 510124 - DNA, 30 bp, Artificial Sequence
  Synthetic oligonucleotide
tgctggctccaagaaaatttgaccgaggta

SEQ ID NO: 510125 - DNA, 30 bp, Artificial Sequence
  Synthetic oligonucleotide
gcagcatacacctagacagcaagcgaggta

SEQ ID NO: 510126 - DNA, 30 bp, Artificial Sequence
  Synthetic oligonucleotide
cgccagtaagcgggtctgacactcgaggta

SEQ ID NO: 510127 - DNA, 30 bp, Artificial Sequence
  Synthetic oligonucleotide
atgcaccgataacagggtttggatgaggta

SEQ ID NO: 510128 - DNA, 30 bp, Artificial Sequence
  Synthetic oligonucleotide
ccgcatgttctcaacgaatgcgttgaggta

SEQ ID NO: 510129 - DNA, 30 bp, Artificial Sequence
  Synthetic oligonucleotide
agttctttacagagtattcgtccataggta

SEQ ID NO: 510130 - DNA, 30 bp, Artificial Sequence
  Synthetic oligonucleotide
cggtacagctactcgagctgccgataggta

SEQ ID NO: 510131 - DNA, 30 bp, Artificial Sequence
  Synthetic oligonucleotide
tcacactagacatggcacgcggtataggta

SEQ ID NO: 510132 - DNA, 30 bp, Artificial Sequence
  Synthetic oligonucleotide
tttcaggatgcctgacagcgaatctaggta

SEQ ID NO: 510133 - DNA, 30 bp, Artificial Sequence
  Synthetic oligonucleotide
gttacatgtgtatcgatcggatggtaggta

SEQ ID NO: 510134 - DNA, 30 bp, Artificial Sequence
  Synthetic oligonucleotide
gtttaaatttgtcagggacggtggtaggta

SEQ ID NO: 510135 - DNA, 30 bp, Artificial Sequence
  Synthetic oligonucleotide
ttaccagtaagcctacaatataattaggta

SEQ ID NO: 510136 - DNA, 30 bp, Artificial Sequence
  Synthetic oligonucleotide
agtaccagggaagttagccacggttaggta

SEQ ID NO: 510137 - DNA, 30 bp, Artificial Sequence
  Synthetic oligonucleotide
ggttacaatttttgttagtctatttaggta

SEQ ID NO: 510138 - DNA, 30 bp, Artificial Sequence
  Synthetic oligonucleotide
agactagtgtgatatcttgtaacaacggta

SEQ ID NO: 510139 - DNA, 30 bp, Artificial Sequence
  Synthetic oligonucleotide
gtttgggtgcgcaaacaccatagcacggta

SEQ ID NO: 510140 - DNA, 30 bp, Artificial Sequence
  Synthetic oligonucleotide
ctcgcgaaacatttacgtagatgcacggta

SEQ ID NO: 510141 - DNA, 30 bp, Artificial Sequence
  Synthetic oligonucleotide
catttgattcgtaaagcattatggacggta

SEQ ID NO: 510142 - DNA, 30 bp, Artificial Sequence
  Synthetic oligonucleotide
gtaaaggcggctccgttatccaatacggta

SEQ ID NO: 510143 - DNA, 30 bp, Artificial Sequence
  Synthetic oligonucleotide
gggatgattgaatttcacgcaagtacggta

SEQ ID NO: 510144 - DNA, 30 bp, Artificial Sequence
  Synthetic oligonucleotide
tcacgacagtacatctagttgtgtacggta

SEQ ID NO: 510145 - DNA, 30 bp, Artificial Sequence
  Synthetic oligonucleotide
gggctcaggtactgctcgggtattacggta

SEQ ID NO: 510146 - DNA, 30 bp, Artificial Sequence
  Synthetic oligonucleotide
gaccctagatataccaggtcggttacggta

SEQ ID NO: 510147 - DNA, 30 bp, Artificial Sequence
  Synthetic oligonucleotide
gtggatcttgctcaactgtcggcaccggta

SEQ ID NO: 510148 - DNA, 30 bp, Artificial Sequence
  Synthetic oligonucleotide
gaggaccgtaatgggcacaattccccggta

SEQ ID NO: 510149 - DNA, 30 bp, Artificial Sequence
  Synthetic oligonucleotide
ttctggttatagtaatattaatgcccggta

SEQ ID NO: 510150 - DNA, 30 bp, Artificial Sequence
  Synthetic oligonucleotide
gaatgtccctctcgggggtaaggtccggta

SEQ ID NO: 510151 - DNA, 30 bp, Artificial Sequence
  Synthetic oligonucleotide
gggggtctctgatcacctgggacagcggta

SEQ ID NO: 510152 - DNA, 30 bp, Artificial Sequence
  Synthetic oligonucleotide
aagcaaccttaccgggcaatggtagcggta

SEQ ID NO: 510153 - DNA, 30 bp, Artificial Sequence
  Synthetic oligonucleotide
gcatacttggaattcgaatttgtagcggta

SEQ ID NO: 510154 - DNA, 30 bp, Artificial Sequence
  Synthetic oligonucleotide
taaagggtaagcccagcgtggaccgcggta

SEQ ID NO: 510155 - DNA, 30 bp, Artificial Sequence
  Synthetic oligonucleotide
tggttgataataattcaggcgttcgcggta

SEQ ID NO: 510156 - DNA, 30 bp, Artificial Sequence
  Synthetic oligonucleotide
ccggtcgctgtctgtggcccgcgggcggta

SEQ ID NO: 510157 - DNA, 30 bp, Artificial Sequence
  Synthetic oligonucleotide
gaccagtatatcgcagttccaggtgcggta

SEQ ID NO: 510158 - DNA, 30 bp, Artificial Sequence
  Synthetic oligonucleotide
aaatacagctatcctcggttctttgcggta

SEQ ID NO: 510159 - DNA, 30 bp, Artificial Sequence
  Synthetic oligonucleotide
gttttcggcacaagcatttaaatatcggta

SEQ ID NO: 510160 - DNA, 30 bp, Artificial Sequence
  Synthetic oligonucleotide
gtaacttcgggttacagcgggaactcggta

SEQ ID NO: 510161 - DNA, 30 bp, Artificial Sequence
  Synthetic oligonucleotide
atcgggatgtgacccaggctcgcctcggta

SEQ ID NO: 510162 - DNA, 30 bp, Artificial Sequence
  Synthetic oligonucleotide
atcgtccttattattgttggggtctcggta

SEQ ID NO: 510163 - DNA, 30 bp, Artificial Sequence
  Synthetic oligonucleotide
taaaagttgatgcgtgacgcggattcggta

SEQ ID NO: 510164 - DNA, 30 bp, Artificial Sequence
  Synthetic oligonucleotide
ttagcgcccaacgtagaggtagaaagggta

SEQ ID NO: 510165 - DNA, 30 bp, Artificial Sequence
  Synthetic oligonucleotide
actgtggcgaataacttgggtgtaagggta

SEQ ID NO: 510166 - DNA, 30 bp, Artificial Sequence
  Synthetic oligonucleotide
gattatgcccggagttcaccctcgagggta

SEQ ID NO: 510167 - DNA, 40 bp, Artificial Sequence
  Synthetic oligonucleotide
aagataatacattcatggtatggtcggggatcggagggta

SEQ ID NO: 510168 - DNA, 30 bp, Artificial Sequence
  Synthetic oligonucleotide
ttgcagccttaccgcgtttagcgtagggta

SEQ ID NO: 510169 - DNA, 30 bp, Artificial Sequence
  Synthetic oligonucleotide
tacggcagtcaacccttgtattttagggta

SEQ ID NO: 510170 - DNA, 30 bp, Artificial Sequence
  Synthetic oligonucleotide
gtccctgcgctaacgccggcgcgacgggta

SEQ ID NO: 510171 - DNA, 30 bp, Artificial Sequence
  Synthetic oligonucleotide
ggtatctgcgacttagagcagaaccgggta

SEQ ID NO: 510172 - DNA, 30 bp, Artificial Sequence
  Synthetic oligonucleotide
gaagacgaaacttctgtaggagtccgggta

SEQ ID NO: 510173 - DNA, 30 bp, Artificial Sequence
  Synthetic oligonucleotide
aggtcattctctggcatgcacaggcgggta

SEQ ID NO: 510174 - DNA, 30 bp, Artificial Sequence
  Synthetic oligonucleotide
aacgccgacgtccgtcaaacatatcgggta

SEQ ID NO: 510175 - DNA, 30 bp, Artificial Sequence
  Synthetic oligonucleotide
gagaagtagcaaaagccggtatatcgggta

SEQ ID NO: 510176 - DNA, 30 bp, Artificial Sequence
  Synthetic oligonucleotide
aacagaatggagacgtctgcatctcgggta

SEQ ID NO: 510177 - DNA, 30 bp, Artificial Sequence
  Synthetic oligonucleotide
tgtagtagggcctccccgaggcttcgggta

SEQ ID NO: 510178 - DNA, 30 bp, Artificial Sequence
  Synthetic oligonucleotide
gaatgaaagcttcggtaattcgttcgggta

SEQ ID NO: 510179 - DNA, 30 bp, Artificial Sequence
  Synthetic oligonucleotide
cgagcaggtctctagtgcggggaaggggta

SEQ ID NO: 510180 - DNA, 30 bp, Artificial Sequence
  Synthetic oligonucleotide
ctccgaccgctggtcaggtgggaaggggta

SEQ ID NO: 510181 - DNA, 30 bp, Artificial Sequence
  Synthetic oligonucleotide
acatctaatgggccttaggctttaggggta

SEQ ID NO: 510182 - DNA, 30 bp, Artificial Sequence
  Synthetic oligonucleotide
tgcttacctgattaataagcaaacggggta

SEQ ID NO: 510183 - DNA, 30 bp, Artificial Sequence
  Synthetic oligonucleotide
acattacacgcgcattacaaaggcggggta

SEQ ID NO: 510184 - DNA, 30 bp, Artificial Sequence
  Synthetic oligonucleotide
cgcgcttcggtgcccctttgtaagggggta

SEQ ID NO: 510185 - DNA, 30 bp, Artificial Sequence
  Synthetic oligonucleotide
ggtgtcaaaattaacaggacctagggggta

SEQ ID NO: 510186 - DNA, 30 bp, Artificial Sequence
  Synthetic oligonucleotide
cggttcgtgcaagtaagtgctcggggggta

SEQ ID NO: 510187 - DNA, 30 bp, Artificial Sequence
  Synthetic oligonucleotide
ttctcatattctgcgacaccctggggggta

SEQ ID NO: 510188 - DNA, 30 bp, Artificial Sequence
  Synthetic oligonucleotide
tacacccgtggtccacatagggtgggggta

SEQ ID NO: 510189 - DNA, 30 bp, Artificial Sequence
  Synthetic oligonucleotide
atataggggcgccacgaggggactggggta

SEQ ID NO: 510190 - DNA, 30 bp, Artificial Sequence
  Synthetic oligonucleotide
atgtattattccaaagtcactgctggggta

SEQ ID NO: 510191 - DNA, 30 bp, Artificial Sequence
  Synthetic oligonucleotide
gtcatattatgtggttcacaacgctgggta

SEQ ID NO: 510192 - DNA, 30 bp, Artificial Sequence
  Synthetic oligonucleotide
agttcttagaaatttacgctaaggtgggta

SEQ ID NO: 510193 - DNA, 30 bp, Artificial Sequence
  Synthetic oligonucleotide
ctcgctaattgctttgatcgaggttgggta

SEQ ID NO: 510194 - DNA, 30 bp, Artificial Sequence
  Synthetic oligonucleotide
tagcgtctgagataaactcgcgtttgggta

SEQ ID NO: 510195 - DNA, 30 bp, Artificial Sequence
  Synthetic oligonucleotide
agttttcctgtgtaaagtagtataatggta

SEQ ID NO: 510196 - DNA, 30 bp, Artificial Sequence
  Synthetic oligonucleotide
cgagattcaattgcactctgtctaatggta

SEQ ID NO: 510197 - DNA, 30 bp, Artificial Sequence
  Synthetic oligonucleotide
caggggacaatgggtgtctcattaatggta

SEQ ID NO: 510198 - DNA, 30 bp, Artificial Sequence
  Synthetic oligonucleotide
gattggaatctcgaggagcagatcatggta

SEQ ID NO: 510199 - DNA, 30 bp, Artificial Sequence
  Synthetic oligonucleotide
gctacgcaatcacgtcggaaacatatggta

SEQ ID NO: 510200 - DNA, 30 bp, Artificial Sequence
  Synthetic oligonucleotide
gcccctaatgtaaacgacgctattatggta

SEQ ID NO: 510201 - DNA, 30 bp, Artificial Sequence
  Synthetic oligonucleotide
taaagaccagactgagcattttttatggta

SEQ ID NO: 510202 - DNA, 30 bp, Artificial Sequence
  Synthetic oligonucleotide
gcaaaaactcacaattgtgtactactggta

SEQ ID NO: 510203 - DNA, 30 bp, Artificial Sequence
  Synthetic oligonucleotide
aacctgaggctagactgcaaccagctggta

SEQ ID NO: 510204 - DNA, 30 bp, Artificial Sequence
  Synthetic oligonucleotide
ctatcacatagagttccccgcccgctggta

SEQ ID NO: 510205 - DNA, 30 bp, Artificial Sequence
  Synthetic oligonucleotide
atccgttcagaggttgataagcggctggta

SEQ ID NO: 510206 - DNA, 30 bp, Artificial Sequence
  Synthetic oligonucleotide
cggtgactcggaatattcttgatgctggta

SEQ ID NO: 510207 - DNA, 30 bp, Artificial Sequence
  Synthetic oligonucleotide
atcgagttcaatggcgcttcgattctggta

SEQ ID NO: 510208 - DNA, 30 bp, Artificial Sequence
  Synthetic oligonucleotide
aatgctcctgcaggcatgtagaaagtggta

SEQ ID NO: 510209 - DNA, 30 bp, Artificial Sequence
  Synthetic oligonucleotide
gattaaatataagatttcctagcagtggta

SEQ ID NO: 510210 - DNA, 30 bp, Artificial Sequence
  Synthetic oligonucleotide
acacacggtatagtgatacatttcgtggta

SEQ ID NO: 510211 - DNA, 30 bp, Artificial Sequence
  Synthetic oligonucleotide
gagtgggctaccccgtccattaaggtggta

SEQ ID NO: 510212 - DNA, 30 bp, Artificial Sequence
  Synthetic oligonucleotide
gcaatcagatttttccatagagaggtggta

SEQ ID NO: 510213 - DNA, 30 bp, Artificial Sequence
  Synthetic oligonucleotide
acttgttttccattacgaggctaggtggta

SEQ ID NO: 510214 - DNA, 30 bp, Artificial Sequence
  Synthetic oligonucleotide
cccctcgctataggacctgggaatgtggta

SEQ ID NO: 510215 - DNA, 30 bp, Artificial Sequence
  Synthetic oligonucleotide
gagagacgtgaaggaacccctgttgtggta

SEQ ID NO: 510216 - DNA, 30 bp, Artificial Sequence
  Synthetic oligonucleotide
attacccatacatttcatgagtttgtggta

SEQ ID NO: 510217 - DNA, 30 bp, Artificial Sequence
  Synthetic oligonucleotide
aaaaatgtatcatgaggtagaatattggta

SEQ ID NO: 510218 - DNA, 30 bp, Artificial Sequence
  Synthetic oligonucleotide
tgataacagaagcgccgtttcttattggta

SEQ ID NO: 510219 - DNA, 30 bp, Artificial Sequence
  Synthetic oligonucleotide
ctccgtatgacccaattttgcaacttggta

SEQ ID NO: 510220 - DNA, 30 bp, Artificial Sequence
  Synthetic oligonucleotide
catactctagcgcgccatcacagcttggta

SEQ ID NO: 510221 - DNA, 30 bp, Artificial Sequence
  Synthetic oligonucleotide
cctggcattctaccaaactgagagttggta

SEQ ID NO: 510222 - DNA, 30 bp, Artificial Sequence
  Synthetic oligonucleotide
aggacacctgcgagaaagatcatgttggta

SEQ ID NO: 510223 - DNA, 30 bp, Artificial Sequence
  Synthetic oligonucleotide
tctaatccgttgcaacccattgatttggta

SEQ ID NO: 510224 - DNA, 30 bp, Artificial Sequence
  Synthetic oligonucleotide
gaacgctttccctacaagtagtaaaatgta

SEQ ID NO: 510225 - DNA, 30 bp, Artificial Sequence
  Synthetic oligonucleotide
tgatagtctatgcatcagtgtcgaaatgta

SEQ ID NO: 510226 - DNA, 30 bp, Artificial Sequence
  Synthetic oligonucleotide
caacgaccaaaacagcggtaaataaatgta

SEQ ID NO: 510227 - DNA, 30 bp, Artificial Sequence
  Synthetic oligonucleotide
ttgctgagataagacggtgtcaacaatgta

SEQ ID NO: 510228 - DNA, 30 bp, Artificial Sequence
  Synthetic oligonucleotide
aagacaacattctgttgcggtaagaatgta

SEQ ID NO: 510229 - DNA, 30 bp, Artificial Sequence
  Synthetic oligonucleotide
gtaagacagtatgggtacatgttgaatgta

SEQ ID NO: 510230 - DNA, 30 bp, Artificial Sequence
  Synthetic oligonucleotide
gctccattagatctgtaggttcataatgta

SEQ ID NO: 510231 - DNA, 30 bp, Artificial Sequence
  Synthetic oligonucleotide
gaaagttaaccgggccaagcgtataatgta

SEQ ID NO: 510232 - DNA, 31 bp, Artificial Sequence
  Synthetic oligonucleotide
ggggttggcattagtgctactcggacatgta

SEQ ID NO: 510233 - DNA, 30 bp, Artificial Sequence
  Synthetic oligonucleotide
aagaattaacgtgtacagaaagtacatgta

SEQ ID NO: 510234 - DNA, 30 bp, Artificial Sequence
  Synthetic oligonucleotide
cctatcctgcaaggttcccttgcccatgta

SEQ ID NO: 510235 - DNA, 30 bp, Artificial Sequence
  Synthetic oligonucleotide
gtcgctgaggtaaaatacaacctccatgta

SEQ ID NO: 510236 - DNA, 30 bp, Artificial Sequence
  Synthetic oligonucleotide
aaagtgttacttcatcttgacaagcatgta

SEQ ID NO: 510237 - DNA, 30 bp, Artificial Sequence
  Synthetic oligonucleotide
cggctgtctgcacgaagggcatagcatgta

SEQ ID NO: 510238 - DNA, 30 bp, Artificial Sequence
  Synthetic oligonucleotide
gcatcagatctttagatcaggattcatgta

SEQ ID NO: 510239 - DNA, 30 bp, Artificial Sequence
  Synthetic oligonucleotide
ccaaactccggttcgcaggatgttcatgta

SEQ ID NO: 510240 - DNA, 29 bp, Artificial Sequence
  Synthetic oligonucleotide
tgatgtccttacactgcatatcagatgta

SEQ ID NO: 510241 - DNA, 30 bp, Artificial Sequence
  Synthetic oligonucleotide
gtccgtcgtctaacgcttaaaatagatgta

SEQ ID NO: 510242 - DNA, 30 bp, Artificial Sequence
  Synthetic oligonucleotide
ctcatgctgtaagacctaggccccgatgta

SEQ ID NO: 510243 - DNA, 30 bp, Artificial Sequence
  Synthetic oligonucleotide
cgaaggaaaagcgtaaacgtgagggatgta

SEQ ID NO: 510244 - DNA, 30 bp, Artificial Sequence
  Synthetic oligonucleotide
catcccggcggcttaaacgctcgggatgta

SEQ ID NO: 510245 - DNA, 30 bp, Artificial Sequence
  Synthetic oligonucleotide
acttggtaggagtattagacaggggatgta

SEQ ID NO: 510246 - DNA, 30 bp, Artificial Sequence
  Synthetic oligonucleotide
ggttgttctgtctgcggcgaatgggatgta

SEQ ID NO: 510247 - DNA, 30 bp, Artificial Sequence
  Synthetic oligonucleotide
tttagttgcagatcacttcggcttgatgta

SEQ ID NO: 510248 - DNA, 30 bp, Artificial Sequence
  Synthetic oligonucleotide
ttatttggggatcgtattaaaaaatatgta

SEQ ID NO: 510249 - DNA, 30 bp, Artificial Sequence
  Synthetic oligonucleotide
gtatgagttttgccgatacgataatatgta

SEQ ID NO: 510250 - DNA, 30 bp, Artificial Sequence
  Synthetic oligonucleotide
tgctcggtatgtacttatacgtactatgta

SEQ ID NO: 510251 - DNA, 30 bp, Artificial Sequence
  Synthetic oligonucleotide
aaccttaaagcattacgcgcgtactatgta

SEQ ID NO: 510252 - DNA, 30 bp, Artificial Sequence
  Synthetic oligonucleotide
gccctctgtgttacgagcaccggttatgta

SEQ ID NO: 510253 - DNA, 30 bp, Artificial Sequence
  Synthetic oligonucleotide
ttatatgatttgtagattccaatttatgta

SEQ ID NO: 510254 - DNA, 30 bp, Artificial Sequence
  Synthetic oligonucleotide
ggtccgccggcatttaggtactccactgta

SEQ ID NO: 510255 - DNA, 30 bp, Artificial Sequence
  Synthetic oligonucleotide
gtagctaacgagcatgtcacgtgcactgta

SEQ ID NO: 510256 - DNA, 30 bp, Artificial Sequence
  Synthetic oligonucleotide
ctccatacaagttcccggcgcgagactgta

SEQ ID NO: 510257 - DNA, 30 bp, Artificial Sequence
  Synthetic oligonucleotide
gggtgcggtcttaaagtaagagtgactgta

SEQ ID NO: 510258 - DNA, 30 bp, Artificial Sequence
  Synthetic oligonucleotide
cattttgcaatctacgcacggcctactgta

SEQ ID NO: 510259 - DNA, 30 bp, Artificial Sequence
  Synthetic oligonucleotide
aataacgtcggtacccggtattttactgta

SEQ ID NO: 510260 - DNA, 30 bp, Artificial Sequence
  Synthetic oligonucleotide
gttaggcgcgtatgtgcggcgagacctgta

SEQ ID NO: 510261 - DNA, 30 bp, Artificial Sequence
  Synthetic oligonucleotide
tgtaagtccaatgagccatattgccctgta

SEQ ID NO: 510262 - DNA, 30 bp, Artificial Sequence
  Synthetic oligonucleotide
aggctcatgcgtgccagcatgaggcctgta

SEQ ID NO: 510263 - DNA, 30 bp, Artificial Sequence
  Synthetic oligonucleotide
aatgtctcggaattacgcgctttgcctgta

SEQ ID NO: 510264 - DNA, 30 bp, Artificial Sequence
  Synthetic oligonucleotide
ctctgcagtgaatcaatgtcaggtcctgta

SEQ ID NO: 510265 - DNA, 30 bp, Artificial Sequence
  Synthetic oligonucleotide
aaggtatactttggtaaagaagcagctgta

SEQ ID NO: 510266 - DNA, 30 bp, Artificial Sequence
  Synthetic oligonucleotide
accatttatgtgattggtcaaacggctgta

SEQ ID NO: 510267 - DNA, 30 bp, Artificial Sequence
  Synthetic oligonucleotide
cgacccgcatactttcgcggcgaatctgta

SEQ ID NO: 510268 - DNA, 30 bp, Artificial Sequence
  Synthetic oligonucleotide
aaattttaggctgaccccgaaacctctgta

SEQ ID NO: 510269 - DNA, 30 bp, Artificial Sequence
  Synthetic oligonucleotide
tgcagaattcatttatgccgttcctctgta

SEQ ID NO: 510270 - DNA, 30 bp, Artificial Sequence
  Synthetic oligonucleotide
ccgacgcgaatagtttcaccggtgtctgta

SEQ ID NO: 510271 - DNA, 30 bp, Artificial Sequence
  Synthetic oligonucleotide
gcatactcgtttataaccgtcttgtctgta

SEQ ID NO: 510272 - DNA, 30 bp, Artificial Sequence
  Synthetic oligonucleotide
cgtgtcttaactcagccaagtatttctgta

SEQ ID NO: 510273 - DNA, 30 bp, Artificial Sequence
  Synthetic oligonucleotide
attttggtaatttctaaatgcaaaagtgta

SEQ ID NO: 510274 - DNA, 30 bp, Artificial Sequence
  Synthetic oligonucleotide
aatcggaatattagtgttcttcaaagtgta

SEQ ID NO: 510275 - DNA, 30 bp, Artificial Sequence
  Synthetic oligonucleotide
cccgggtcccctaattgtccctaaagtgta

SEQ ID NO: 510276 - DNA, 30 bp, Artificial Sequence
  Synthetic oligonucleotide
accttataacgagagcagtaaagaagtgta

SEQ ID NO: 510277 - DNA, 30 bp, Artificial Sequence
  Synthetic oligonucleotide
atagcgaccctcaggggacccctaagtgta

SEQ ID NO: 510278 - DNA, 30 bp, Artificial Sequence
  Synthetic oligonucleotide
gggtctgtgtagcaccgcttattaagtgta

SEQ ID NO: 510279 - DNA, 30 bp, Artificial Sequence
  Synthetic oligonucleotide
agaggtaagagtagatctatttacagtgta

SEQ ID NO: 510280 - DNA, 30 bp, Artificial Sequence
  Synthetic oligonucleotide
gttgtctgtgtacggtcaaggggcagtgta

SEQ ID NO: 510281 - DNA, 30 bp, Artificial Sequence
  Synthetic oligonucleotide
aatctgaaaatcctgggagaaatcagtgta

SEQ ID NO: 510282 - DNA, 30 bp, Artificial Sequence
  Synthetic oligonucleotide
ttttcagggactgaagataattttagtgta

SEQ ID NO: 510283 - DNA, 30 bp, Artificial Sequence
  Synthetic oligonucleotide
gaactatatcgggtttaataataacgtgta

SEQ ID NO: 510284 - DNA, 30 bp, Artificial Sequence
  Synthetic oligonucleotide
cagctactgtgcctccggcaaaatcgtgta

SEQ ID NO: 510285 - DNA, 30 bp, Artificial Sequence
  Synthetic oligonucleotide
ttagaccccataagagcgatgaatcgtgta

SEQ ID NO: 510286 - DNA, 30 bp, Artificial Sequence
  Synthetic oligonucleotide
ccgtcgctcgccctcctgtgtgctcgtgta

SEQ ID NO: 510287 - DNA, 30 bp, Artificial Sequence
  Synthetic oligonucleotide
tttctaacggtaacacgtcgaagtcgtgta

SEQ ID NO: 510288 - DNA, 30 bp, Artificial Sequence
  Synthetic oligonucleotide
gatgtttaaaagcccttgtacgttcgtgta

SEQ ID NO: 510289 - DNA, 30 bp, Artificial Sequence
  Synthetic oligonucleotide
gcagagaccttattagttgctataggtgta

SEQ ID NO: 510290 - DNA, 30 bp, Artificial Sequence
  Synthetic oligonucleotide
aattttggcaatcgcttgcatgtaggtgta

SEQ ID NO: 510291 - DNA, 30 bp, Artificial Sequence
  Synthetic oligonucleotide
gcattaatattttaaggcgtaggcggtgta

SEQ ID NO: 510292 - DNA, 31 bp, Artificial Sequence
  Synthetic oligonucleotide
ttttagtaattcgggctttggactcggtgta

SEQ ID NO: 510293 - DNA, 30 bp, Artificial Sequence
  Synthetic oligonucleotide
gctttctgatgcttcatccggctcggtgta

SEQ ID NO: 510294 - DNA, 30 bp, Artificial Sequence
  Synthetic oligonucleotide
tatccctattggacaccccgtaagggtgta

SEQ ID NO: 510295 - DNA, 30 bp, Artificial Sequence
  Synthetic oligonucleotide
attacccatgattttatgaagacatgtgta

SEQ ID NO: 510296 - DNA, 30 bp, Artificial Sequence
  Synthetic oligonucleotide
ctggggtcctcttaccctccgagatgtgta

SEQ ID NO: 510297 - DNA, 30 bp, Artificial Sequence
  Synthetic oligonucleotide
accgttcctttcggggcatctggatgtgta

SEQ ID NO: 510298 - DNA, 30 bp, Artificial Sequence
  Synthetic oligonucleotide
ctggtcatatttccgccgctcttatgtgta

SEQ ID NO: 510299 - DNA, 30 bp, Artificial Sequence
  Synthetic oligonucleotide
acaaactgtgtcttgagcgaatactgtgta

SEQ ID NO: 510300 - DNA, 30 bp, Artificial Sequence
  Synthetic oligonucleotide
cataggacaccgccggagcttctctgtgta

SEQ ID NO: 510301 - DNA, 30 bp, Artificial Sequence
  Synthetic oligonucleotide
tggaatcgcccatttccacggccgtgtgta

SEQ ID NO: 510302 - DNA, 30 bp, Artificial Sequence
  Synthetic oligonucleotide
ctgatactatggatgctataagattgtgta

SEQ ID NO: 510303 - DNA, 30 bp, Artificial Sequence
  Synthetic oligonucleotide
cccgaatggtcgagcttatctatttgtgta

SEQ ID NO: 510304 - DNA, 30 bp, Artificial Sequence
  Synthetic oligonucleotide
ggccccatcgcttttggagttgtttgtgta

SEQ ID NO: 510305 - DNA, 30 bp, Artificial Sequence
  Synthetic oligonucleotide
attctatttcgaatgacgtaagaaattgta

SEQ ID NO: 510306 - DNA, 30 bp, Artificial Sequence
  Synthetic oligonucleotide
gcgtgaaataccacgcatctagcaattgta

SEQ ID NO: 510307 - DNA, 30 bp, Artificial Sequence
  Synthetic oligonucleotide
gcacttgaaagtccggctctgtcaattgta

SEQ ID NO: 510308 - DNA, 30 bp, Artificial Sequence
  Synthetic oligonucleotide
tcggaccttggtcggcgcgggtacattgta

SEQ ID NO: 510309 - DNA, 30 bp, Artificial Sequence
  Synthetic oligonucleotide
gtattttacaatcgtgccaggaccattgta

SEQ ID NO: 510310 - DNA, 30 bp, Artificial Sequence
  Synthetic oligonucleotide
tgggcgggtcaaatgggtgtctccattgta

SEQ ID NO: 510311 - DNA, 30 bp, Artificial Sequence
  Synthetic oligonucleotide
tccaatatgaccgagaataggccgattgta

SEQ ID NO: 510312 - DNA, 30 bp, Artificial Sequence
  Synthetic oligonucleotide
aagaatttctccgagcgtgtctggattgta

SEQ ID NO: 510313 - DNA, 30 bp, Artificial Sequence
  Synthetic oligonucleotide
gttggtttttcttcgcaagtcaatattgta

SEQ ID NO: 510314 - DNA, 30 bp, Artificial Sequence
  Synthetic oligonucleotide
aaataagtctgggaattgatagatattgta

SEQ ID NO: 510315 - DNA, 30 bp, Artificial Sequence
  Synthetic oligonucleotide
atttataaggaagagtactcccttattgta

SEQ ID NO: 510316 - DNA, 30 bp, Artificial Sequence
  Synthetic oligonucleotide
ggcaaggcttggcagcggtaagaacttgta

SEQ ID NO: 510317 - DNA, 30 bp, Artificial Sequence
  Synthetic oligonucleotide
tcaagttgtatccttatttctaaagttgta

SEQ ID NO: 510318 - DNA, 30 bp, Artificial Sequence
  Synthetic oligonucleotide
gagattcgggaacttaccaagtcagttgta

SEQ ID NO: 510319 - DNA, 30 bp, Artificial Sequence
  Synthetic oligonucleotide
tgcaaaagtcaccccaggggtgtagttgta

SEQ ID NO: 510320 - DNA, 30 bp, Artificial Sequence
  Synthetic oligonucleotide
cgaagtggggacccgtcgatattagttgta

SEQ ID NO: 510321 - DNA, 30 bp, Artificial Sequence
  Synthetic oligonucleotide
ggtgatctctattaggatgcgagggttgta

SEQ ID NO: 510322 - DNA, 30 bp, Artificial Sequence
  Synthetic oligonucleotide
ccttgggatcgataggtttcgtatgttgta

SEQ ID NO: 510323 - DNA, 30 bp, Artificial Sequence
  Synthetic oligonucleotide
tcttgaaacaagaggcagctcaaatttgta

SEQ ID NO: 510324 - DNA, 30 bp, Artificial Sequence
  Synthetic oligonucleotide
ttccggtaataccatctacagcaatttgta

SEQ ID NO: 510325 - DNA, 30 bp, Artificial Sequence
  Synthetic oligonucleotide
agaaaaaattcatagagcgacgaatttgta

SEQ ID NO: 510326 - DNA, 30 bp, Artificial Sequence
  Synthetic oligonucleotide
ctaacactttatacgagcaattcatttgta

SEQ ID NO: 510327 - DNA, 30 bp, Artificial Sequence
  Synthetic oligonucleotide
gttatgccggagtttttacccttatttgta

SEQ ID NO: 510328 - DNA, 30 bp, Artificial Sequence
  Synthetic oligonucleotide
tttccctttactagctaattgatctttgta

SEQ ID NO: 510329 - DNA, 30 bp, Artificial Sequence
  Synthetic oligonucleotide
cagacccgcccggcgtccagcaggtttgta

SEQ ID NO: 510330 - DNA, 30 bp, Artificial Sequence
  Synthetic oligonucleotide
tattgtcataacgcagtaccgtcttttgta

SEQ ID NO: 510331 - DNA, 30 bp, Artificial Sequence
  Synthetic oligonucleotide
cttttagtacggcattttaatatttttgta

SEQ ID NO: 510332 - DNA, 30 bp, Artificial Sequence
  Synthetic oligonucleotide
ttgattagaacgaaagcatacctttttgta

SEQ ID NO: 510333 - DNA, 30 bp, Artificial Sequence
  Synthetic oligonucleotide
gttcgatacagctggccaactctttttgta

SEQ ID NO: 510334 - DNA, 30 bp, Artificial Sequence
  Synthetic oligonucleotide
gtggactctgggtcagttttacaaaaatta

SEQ ID NO: 510335 - DNA, 30 bp, Artificial Sequence
  Synthetic oligonucleotide
taatgtatcgtcgcatggctttaaaaatta

SEQ ID NO: 510336 - DNA, 30 bp, Artificial Sequence
  Synthetic oligonucleotide
tttcgggattcgcctctactccgaaaatta

SEQ ID NO: 510337 - DNA, 30 bp, Artificial Sequence
  Synthetic oligonucleotide
gacattatctatgggctttcctgaaaatta

SEQ ID NO: 510338 - DNA, 30 bp, Artificial Sequence
  Synthetic oligonucleotide
agttcgttctttaatgattaagtaaaatta

SEQ ID NO: 510339 - DNA, 30 bp, Artificial Sequence
  Synthetic oligonucleotide
attttgtaacatgatgaagttttcaaatta

SEQ ID NO: 510340 - DNA, 30 bp, Artificial Sequence
  Synthetic oligonucleotide
ttgtgtgattcgagctagaggaagaaatta

SEQ ID NO: 510341 - DNA, 30 bp, Artificial Sequence
  Synthetic oligonucleotide
tttgcctcgttgatattagagatgaaatta

SEQ ID NO: 510342 - DNA, 30 bp, Artificial Sequence
  Synthetic oligonucleotide
actgtacctagagttatttaactgaaatta

SEQ ID NO: 510343 - DNA, 30 bp, Artificial Sequence
  Synthetic oligonucleotide
tgagagcaggacgctctggtctataaatta

SEQ ID NO: 510344 - DNA, 30 bp, Artificial Sequence
  Synthetic oligonucleotide
aggggcccttgatagaaccgccctaaatta

SEQ ID NO: 510345 - DNA, 30 bp, Artificial Sequence
  Synthetic oligonucleotide
catgatttaatgttacaatcaagtaaatta

SEQ ID NO: 510346 - DNA, 30 bp, Artificial Sequence
  Synthetic oligonucleotide
gctgcaaccgcttggatttatattaaatta

SEQ ID NO: 510347 - DNA, 30 bp, Artificial Sequence
  Synthetic oligonucleotide
gcgacgttccttcggagtaattttaaatta

SEQ ID NO: 510348 - DNA, 30 bp, Artificial Sequence
  Synthetic oligonucleotide
atttactaagttatggacgttaaacaatta

SEQ ID NO: 510349 - DNA, 30 bp, Artificial Sequence
  Synthetic oligonucleotide
gcacctgccaagtgccgcggacaacaatta

SEQ ID NO: 510350 - DNA, 29 bp, Artificial Sequence
  Synthetic oligonucleotide
taatatggttgcgatcaagcttacaatta

SEQ ID NO: 510351 - DNA, 30 bp, Artificial Sequence
  Synthetic oligonucleotide
attgcgagcacgcagtcaactagccaatta

SEQ ID NO: 510352 - DNA, 30 bp, Artificial Sequence
  Synthetic oligonucleotide
gtcgttttatagcagacaccggagcaatta

SEQ ID NO: 510353 - DNA, 30 bp, Artificial Sequence
  Synthetic oligonucleotide
tattgatgagtaatttcgaacaggcaatta

SEQ ID NO: 510354 - DNA, 30 bp, Artificial Sequence
  Synthetic oligonucleotide
tgaagtttttgttaaatttgcactcaatta

SEQ ID NO: 510355 - DNA, 30 bp, Artificial Sequence
  Synthetic oligonucleotide
aattatatatcctttaaatgcagtcaatta

SEQ ID NO: 510356 - DNA, 30 bp, Artificial Sequence
  Synthetic oligonucleotide
atgcgatggggccctgtgaacggtcaatta

SEQ ID NO: 510357 - DNA, 30 bp, Artificial Sequence
  Synthetic oligonucleotide
tggtacgtaaaccccacgggtattcaatta

SEQ ID NO: 510358 - DNA, 30 bp, Artificial Sequence
  Synthetic oligonucleotide
ccacataatacgccattacaggaagaatta

SEQ ID NO: 510359 - DNA, 30 bp, Artificial Sequence
  Synthetic oligonucleotide
cgaagaatgcccgacatccccggagaatta

SEQ ID NO: 510360 - DNA, 30 bp, Artificial Sequence
  Synthetic oligonucleotide
gttgtagggatgctatgctaattcgaatta

SEQ ID NO: 510361 - DNA, 30 bp, Artificial Sequence
  Synthetic oligonucleotide
gaaaattcaatcgtccgcaaataggaatta

SEQ ID NO: 510362 - DNA, 30 bp, Artificial Sequence
  Synthetic oligonucleotide
ataccgtcgttggataaatggccggaatta

SEQ ID NO: 510363 - DNA, 30 bp, Artificial Sequence
  Synthetic oligonucleotide
tctacatacggacgctcatcaaatgaatta

SEQ ID NO: 510364 - DNA, 30 bp, Artificial Sequence
  Synthetic oligonucleotide
ttcccgaatccgtttgcgagatttgaatta

SEQ ID NO: 510365 - DNA, 30 bp, Artificial Sequence
  Synthetic oligonucleotide
atcggtgttgaacgaaacgtctcataatta

SEQ ID NO: 510366 - DNA, 30 bp, Artificial Sequence
  Synthetic oligonucleotide
ttagtgtcgtctcagtaagtcgtctaatta

SEQ ID NO: 510367 - DNA, 30 bp, Artificial Sequence
  Synthetic oligonucleotide
cccggcaccacgcaggtatagttctaatta

SEQ ID NO: 510368 - DNA, 30 bp, Artificial Sequence
  Synthetic oligonucleotide
ccttgctaacatacccacagtttgtaatta

SEQ ID NO: 510369 - DNA, 30 bp, Artificial Sequence
  Synthetic oligonucleotide
taatatgacctcttgcattaatcttaatta

SEQ ID NO: 510370 - DNA, 30 bp, Artificial Sequence
  Synthetic oligonucleotide
atttcgggtgcgctcttcttatcttaatta

SEQ ID NO: 510371 - DNA, 30 bp, Artificial Sequence
  Synthetic oligonucleotide
atgttgttcgcagcgaagtcgcaaacatta

SEQ ID NO: 510372 - DNA, 30 bp, Artificial Sequence
  Synthetic oligonucleotide
aaccaggcgtgcttctttatcgcaacatta

SEQ ID NO: 510373 - DNA, 30 bp, Artificial Sequence
  Synthetic oligonucleotide
ggtggttcctacctctatagcgtaacatta

SEQ ID NO: 510374 - DNA, 30 bp, Artificial Sequence
  Synthetic oligonucleotide
ttttaacagtctataacttcggaaccatta

SEQ ID NO: 510375 - DNA, 30 bp, Artificial Sequence
  Synthetic oligonucleotide
cttcatgcgaatagtatagtctcaccatta

SEQ ID NO: 510376 - DNA, 30 bp, Artificial Sequence
  Synthetic oligonucleotide
tgtagttgcgaccctaccaatgacccatta

SEQ ID NO: 510377 - DNA, 30 bp, Artificial Sequence
  Synthetic oligonucleotide
agcatctataatggctctcgatcgccatta

SEQ ID NO: 510378 - DNA, 30 bp, Artificial Sequence
  Synthetic oligonucleotide
agatatatacgctccgcaccgcggccatta

SEQ ID NO: 510379 - DNA, 30 bp, Artificial Sequence
  Synthetic oligonucleotide
ttgttgtcatgtcgtagtcaggttccatta

SEQ ID NO: 510380 - DNA, 30 bp, Artificial Sequence
  Synthetic oligonucleotide
attacgcatggcacaggcctttaagcatta

SEQ ID NO: 510381 - DNA, 30 bp, Artificial Sequence
  Synthetic oligonucleotide
gatatgaattcttacggacagctagcatta

SEQ ID NO: 510382 - DNA, 30 bp, Artificial Sequence
  Synthetic oligonucleotide
tcgcctccattgattacttaggacgcatta

SEQ ID NO: 510383 - DNA, 30 bp, Artificial Sequence
  Synthetic oligonucleotide
tcctcctttgatctcggtccaggcgcatta

SEQ ID NO: 510384 - DNA, 30 bp, Artificial Sequence
  Synthetic oligonucleotide
agtaaaagtattaagccaggcctcgcatta

SEQ ID NO: 510385 - DNA, 30 bp, Artificial Sequence
  Synthetic oligonucleotide
gcccctacagccggagcctacgtggcatta

SEQ ID NO: 510386 - DNA, 30 bp, Artificial Sequence
  Synthetic oligonucleotide
aatcccgcgacggcattcggacatgcatta

SEQ ID NO: 510387 - DNA, 30 bp, Artificial Sequence
  Synthetic oligonucleotide
atctttaagtttagttgcggaactgcatta

SEQ ID NO: 510388 - DNA, 30 bp, Artificial Sequence
  Synthetic oligonucleotide
gtcattacggagcaggcacaggaatcatta

SEQ ID NO: 510389 - DNA, 30 bp, Artificial Sequence
  Synthetic oligonucleotide
tgtttttaatcgcaaacgcaggcatcatta

SEQ ID NO: 510390 - DNA, 30 bp, Artificial Sequence
  Synthetic oligonucleotide
agaatcgccttcggaagccgtgcatcatta

SEQ ID NO: 510391 - DNA, 30 bp, Artificial Sequence
  Synthetic oligonucleotide
taagtacgtgtatgtgttagtatatcatta

SEQ ID NO: 510392 - DNA, 30 bp, Artificial Sequence
  Synthetic oligonucleotide
taggtccaaatgtcgtgttacacctcatta

SEQ ID NO: 510393 - DNA, 30 bp, Artificial Sequence
  Synthetic oligonucleotide
tttctacggttatatacctttagctcatta

SEQ ID NO: 510394 - DNA, 30 bp, Artificial Sequence
  Synthetic oligonucleotide
tttttatccgtacagtatcgtgagtcatta

SEQ ID NO: 510395 - DNA, 30 bp, Artificial Sequence
  Synthetic oligonucleotide
ctcccctggtctcctagacaagggtcatta

SEQ ID NO: 510396 - DNA, 30 bp, Artificial Sequence
  Synthetic oligonucleotide
tcgtaagcataaattcaggctgacagatta

SEQ ID NO: 510397 - DNA, 30 bp, Artificial Sequence
  Synthetic oligonucleotide
aaaaggatataacgcgctgggttcagatta

SEQ ID NO: 510398 - DNA, 30 bp, Artificial Sequence
  Synthetic oligonucleotide
catcgatctgattgaatattggggagatta

SEQ ID NO: 510399 - DNA, 30 bp, Artificial Sequence
  Synthetic oligonucleotide
aacgcgtaggtacagacgatactgagatta

SEQ ID NO: 510400 - DNA, 30 bp, Artificial Sequence
  Synthetic oligonucleotide
tttccaggctgggtttacctatgtagatta

SEQ ID NO: 510401 - DNA, 30 bp, Artificial Sequence
  Synthetic oligonucleotide
agaaacgatcgcagttcttaaattagatta

SEQ ID NO: 510402 - DNA, 30 bp, Artificial Sequence
  Synthetic oligonucleotide
tgctagcgttactatgtatctatacgatta

SEQ ID NO: 510403 - DNA, 30 bp, Artificial Sequence
  Synthetic oligonucleotide
gatagggtgcttgcaccccgtatacgatta

SEQ ID NO: 510404 - DNA, 30 bp, Artificial Sequence
  Synthetic oligonucleotide
gccagcgggcgcgattaattcatccgatta

SEQ ID NO: 510405 - DNA, 30 bp, Artificial Sequence
  Synthetic oligonucleotide
cggtatgacatcttctgcaggcagcgatta

SEQ ID NO: 510406 - DNA, 30 bp, Artificial Sequence
  Synthetic oligonucleotide
aaagccccagggggctccaagacgcgatta

SEQ ID NO: 510407 - DNA, 30 bp, Artificial Sequence
  Synthetic oligonucleotide
acctctcacccgaaagttcacgcgcgatta

SEQ ID NO: 510408 - DNA, 30 bp, Artificial Sequence
  Synthetic oligonucleotide
agtagtcatttaaagcagatgttgcgatta

SEQ ID NO: 510409 - DNA, 30 bp, Artificial Sequence
  Synthetic oligonucleotide
aacttatgggaatagaaccgacaaggatta

SEQ ID NO: 510410 - DNA, 30 bp, Artificial Sequence
  Synthetic oligonucleotide
gacggcatatataagggcaaagaaggatta

SEQ ID NO: 510411 - DNA, 30 bp, Artificial Sequence
  Synthetic oligonucleotide
ttagtgcatacacttaacggtacaggatta

SEQ ID NO: 510412 - DNA, 30 bp, Artificial Sequence
  Synthetic oligonucleotide
ggtacgttccgacgatgaaattacggatta

SEQ ID NO: 510413 - DNA, 30 bp, Artificial Sequence
  Synthetic oligonucleotide
aactcgttgacaaggacgcgtcccggatta

SEQ ID NO: 510414 - DNA, 30 bp, Artificial Sequence
  Synthetic oligonucleotide
gagatacaattctgagatcagctcggatta

SEQ ID NO: 510415 - DNA, 30 bp, Artificial Sequence
  Synthetic oligonucleotide
caggaccaaaggtaagtgacgtcgggatta

SEQ ID NO: 510416 - DNA, 30 bp, Artificial Sequence
  Synthetic oligonucleotide
aattcgtccaggcttgtgttcgttggatta

SEQ ID NO: 510417 - DNA, 30 bp, Artificial Sequence
  Synthetic oligonucleotide
taatcatcgggcattatttaaggatgatta

SEQ ID NO: 510418 - DNA, 30 bp, Artificial Sequence
  Synthetic oligonucleotide
ttttgccgttcctattggcaagtatgatta

SEQ ID NO: 510419 - DNA, 28 bp, Artificial Sequence
  Synthetic oligonucleotide
ttctataatgcggggctaatgctgatta

SEQ ID NO: 510420 - DNA, 30 bp, Artificial Sequence
  Synthetic oligonucleotide
tctttttatcgatacgattcgctgtgatta

SEQ ID NO: 510421 - DNA, 30 bp, Artificial Sequence
  Synthetic oligonucleotide
gtgattggtccgcaggcaatcgtgtgatta

SEQ ID NO: 510422 - DNA, 30 bp, Artificial Sequence
  Synthetic oligonucleotide
gacctgcattatagagtctagtcttgatta

SEQ ID NO: 510423 - DNA, 30 bp, Artificial Sequence
  Synthetic oligonucleotide
accgatagcaccagtgtaggtgacatatta

SEQ ID NO: 510424 - DNA, 30 bp, Artificial Sequence
  Synthetic oligonucleotide
ttggttctacgttagaatccaatcatatta

SEQ ID NO: 510425 - DNA, 30 bp, Artificial Sequence
  Synthetic oligonucleotide
tttcgattggtctaatagccgtagatatta

SEQ ID NO: 510426 - DNA, 30 bp, Artificial Sequence
  Synthetic oligonucleotide
gcccgattcgcatacccgtggttgatatta

SEQ ID NO: 510427 - DNA, 30 bp, Artificial Sequence
  Synthetic oligonucleotide
tctatcatatctgggggagcccctatatta

SEQ ID NO: 510428 - DNA, 30 bp, Artificial Sequence
  Synthetic oligonucleotide
agggtacttcagcgtggttagcgtatatta

SEQ ID NO: 510429 - DNA, 30 bp, Artificial Sequence
  Synthetic oligonucleotide
tgtctgcggagccatactgtcattatatta

SEQ ID NO: 510430 - DNA, 30 bp, Artificial Sequence
  Synthetic oligonucleotide
gaattttctgcgagggaggagattatatta

SEQ ID NO: 510431 - DNA, 29 bp, Artificial Sequence
  Synthetic oligonucleotide
gacattcagagccatatctcgttatatta

SEQ ID NO: 510432 - DNA, 30 bp, Artificial Sequence
  Synthetic oligonucleotide
tgagtattcgtatataacggacaactatta

SEQ ID NO: 510433 - DNA, 30 bp, Artificial Sequence
  Synthetic oligonucleotide
cgcagattttttcagccgatggcactatta

SEQ ID NO: 510434 - DNA, 30 bp, Artificial Sequence
  Synthetic oligonucleotide
attgtcctgtagctttctacgggactatta

SEQ ID NO: 510435 - DNA, 30 bp, Artificial Sequence
  Synthetic oligonucleotide
tttgaggtgtggctgaagagggccctatta

SEQ ID NO: 510436 - DNA, 30 bp, Artificial Sequence
  Synthetic oligonucleotide
tagtggctcacagaactgtcggagctatta

SEQ ID NO: 510437 - DNA, 30 bp, Artificial Sequence
  Synthetic oligonucleotide
gctatcgttttgggaagaacgatgctatta

SEQ ID NO: 510438 - DNA, 30 bp, Artificial Sequence
  Synthetic oligonucleotide
ttacgatcataaggtctagggtatctatta

SEQ ID NO: 510439 - DNA, 30 bp, Artificial Sequence
  Synthetic oligonucleotide
ctggctatctcgttcggagcagaagtatta

SEQ ID NO: 510440 - DNA, 30 bp, Artificial Sequence
  Synthetic oligonucleotide
gagtcctcgaccatagtatcttgagtatta

SEQ ID NO: 510441 - DNA, 30 bp, Artificial Sequence
  Synthetic oligonucleotide
gcatgtatcgattacggttaagtagtatta

SEQ ID NO: 510442 - DNA, 30 bp, Artificial Sequence
  Synthetic oligonucleotide
taacggttggactcatttatctccgtatta

SEQ ID NO: 510443 - DNA, 30 bp, Artificial Sequence
  Synthetic oligonucleotide
agacgctgtaattcaatttgtcgggtatta

SEQ ID NO: 510444 - DNA, 30 bp, Artificial Sequence
  Synthetic oligonucleotide
atccacagccatgggtggctgatggtatta

SEQ ID NO: 510445 - DNA, 30 bp, Artificial Sequence
  Synthetic oligonucleotide
gttttcaggagcatgtgacatcatgtatta

SEQ ID NO: 510446 - DNA, 30 bp, Artificial Sequence
  Synthetic oligonucleotide
tttattattcccaatggggcgaaattatta

SEQ ID NO: 510447 - DNA, 30 bp, Artificial Sequence
  Synthetic oligonucleotide
tttaatctgagacggtacctacaattatta

SEQ ID NO: 510448 - DNA, 30 bp, Artificial Sequence
  Synthetic oligonucleotide
tagtcagtgcctagacatcagcaattatta

SEQ ID NO: 510449 - DNA, 30 bp, Artificial Sequence
  Synthetic oligonucleotide
tcttaaatgaaggaggttttttcattatta

SEQ ID NO: 510450 - DNA, 30 bp, Artificial Sequence
  Synthetic oligonucleotide
ccacatccatacatggatgggggattatta

SEQ ID NO: 510451 - DNA, 30 bp, Artificial Sequence
  Synthetic oligonucleotide
gccttgattaaacctttataattattatta

SEQ ID NO: 510452 - DNA, 30 bp, Artificial Sequence
  Synthetic oligonucleotide
agattatatgccagtgttactgggttatta

SEQ ID NO: 510453 - DNA, 30 bp, Artificial Sequence
  Synthetic oligonucleotide
tccaggcgatgcaagtagtgcctgttatta

SEQ ID NO: 510454 - DNA, 30 bp, Artificial Sequence
  Synthetic oligonucleotide
ttcgtctcttttcgttattgtgatttatta

SEQ ID NO: 510455 - DNA, 30 bp, Artificial Sequence
  Synthetic oligonucleotide
gtacgtatggatgtcagaagttatttatta

SEQ ID NO: 510456 - DNA, 30 bp, Artificial Sequence
  Synthetic oligonucleotide
tgaatgagcatcatgagctggtgcaactta

SEQ ID NO: 510457 - DNA, 30 bp, Artificial Sequence
  Synthetic oligonucleotide
cagaatcaattccgtagctcgtagaactta

SEQ ID NO: 510458 - DNA, 30 bp, Artificial Sequence
  Synthetic oligonucleotide
ggaccacttcctgagcgatggagtaactta

SEQ ID NO: 510459 - DNA, 30 bp, Artificial Sequence
  Synthetic oligonucleotide
gtgattacgcggtgtcttctgagtaactta

SEQ ID NO: 510460 - DNA, 30 bp, Artificial Sequence
  Synthetic oligonucleotide
aggtgcgagtggtattagtcaattaactta

SEQ ID NO: 510461 - DNA, 29 bp, Artificial Sequence
  Synthetic oligonucleotide
cttcgtttgctcttgtctcttttaactta

SEQ ID NO: 510462 - DNA, 30 bp, Artificial Sequence
  Synthetic oligonucleotide
tatctatatggcaacgttgaaaaacactta

SEQ ID NO: 510463 - DNA, 30 bp, Artificial Sequence
  Synthetic oligonucleotide
atgttctgaaactataaacctgaacactta

SEQ ID NO: 510464 - DNA, 30 bp, Artificial Sequence
  Synthetic oligonucleotide
ttataattttggcgtaaaggataacactta

SEQ ID NO: 510465 - DNA, 30 bp, Artificial Sequence
  Synthetic oligonucleotide
aataagagacggaccatagtcggacactta

SEQ ID NO: 510466 - DNA, 30 bp, Artificial Sequence
  Synthetic oligonucleotide
catttcacgtagccccttctaaaccactta

SEQ ID NO: 510467 - DNA, 30 bp, Artificial Sequence
  Synthetic oligonucleotide
aaattggacactattgtccactaccactta

SEQ ID NO: 510468 - DNA, 30 bp, Artificial Sequence
  Synthetic oligonucleotide
cggattccggcatgcctcccatgccactta

SEQ ID NO: 510469 - DNA, 30 bp, Artificial Sequence
  Synthetic oligonucleotide
agacgtatccggactggtagcccgcactta

SEQ ID NO: 510470 - DNA, 30 bp, Artificial Sequence
  Synthetic oligonucleotide
gaacgcgctttttctattcaagcgcactta

SEQ ID NO: 510471 - DNA, 30 bp, Artificial Sequence
  Synthetic oligonucleotide
taaccaaccccatgtatacttgggcactta

SEQ ID NO: 510472 - DNA, 30 bp, Artificial Sequence
  Synthetic oligonucleotide
atgtttcgcagccatgggggactgcactta

SEQ ID NO: 510473 - DNA, 30 bp, Artificial Sequence
  Synthetic oligonucleotide
gcattggagtttgatgcgccttatcactta

SEQ ID NO: 510474 - DNA, 30 bp, Artificial Sequence
  Synthetic oligonucleotide
ttcacggcgctgatagcgctcggtcactta

SEQ ID NO: 510475 - DNA, 30 bp, Artificial Sequence
  Synthetic oligonucleotide
ttatgctctatgccgtaaggcgcagactta

SEQ ID NO: 510476 - DNA, 30 bp, Artificial Sequence
  Synthetic oligonucleotide
tcgatcggtggaaccttcgccattgactta

SEQ ID NO: 510477 - DNA, 30 bp, Artificial Sequence
  Synthetic oligonucleotide
tttatagcgggagctaattccccatactta

SEQ ID NO: 510478 - DNA, 30 bp, Artificial Sequence
  Synthetic oligonucleotide
cactgtctttccagacatgcttcatactta

SEQ ID NO: 510479 - DNA, 30 bp, Artificial Sequence
  Synthetic oligonucleotide
gagtccagacgcggtgcaaaaagatactta

SEQ ID NO: 510480 - DNA, 30 bp, Artificial Sequence
  Synthetic oligonucleotide
atcccattagggtccctcgtagcgtactta

SEQ ID NO: 510481 - DNA, 30 bp, Artificial Sequence
  Synthetic oligonucleotide
tttctaaaggatcgcaaatgggtaacctta

SEQ ID NO: 510482 - DNA, 30 bp, Artificial Sequence
  Synthetic oligonucleotide
atgacaaggtatcgtaatatggatacctta

SEQ ID NO: 510483 - DNA, 30 bp, Artificial Sequence
  Synthetic oligonucleotide
ggataagcatggtatgatatcgaaccctta

SEQ ID NO: 510484 - DNA, 30 bp, Artificial Sequence
  Synthetic oligonucleotide
ttacatcgccgtagacataccttaccctta

SEQ ID NO: 510485 - DNA, 30 bp, Artificial Sequence
  Synthetic oligonucleotide
cccagttgctccacgcaggagcacccctta

SEQ ID NO: 510486 - DNA, 30 bp, Artificial Sequence
  Synthetic oligonucleotide
gggactcattcctccctgtcgcagccctta

SEQ ID NO: 510487 - DNA, 30 bp, Artificial Sequence
  Synthetic oligonucleotide
tgcgcagtagttttgtttttatgtccctta

SEQ ID NO: 510488 - DNA, 30 bp, Artificial Sequence
  Synthetic oligonucleotide
gtagtagtaacgcgctcgcaaagagcctta

SEQ ID NO: 510489 - DNA, 30 bp, Artificial Sequence
  Synthetic oligonucleotide
tgctctaggtcgcggttgaatggggcctta

SEQ ID NO: 510490 - DNA, 30 bp, Artificial Sequence
  Synthetic oligonucleotide
tcatagtttgggaggttgctagatgcctta

SEQ ID NO: 510491 - DNA, 30 bp, Artificial Sequence
  Synthetic oligonucleotide
aataggtgcggcaataagcatgctgcctta

SEQ ID NO: 510492 - DNA, 30 bp, Artificial Sequence
  Synthetic oligonucleotide
gttttagtaactagaattaaaaaatcctta

SEQ ID NO: 510493 - DNA, 30 bp, Artificial Sequence
  Synthetic oligonucleotide
cagacctacctttcccgaggtggatcctta

SEQ ID NO: 510494 - DNA, 30 bp, Artificial Sequence
  Synthetic oligonucleotide
ggggcagaatctagaatggtaacgtcctta

SEQ ID NO: 510495 - DNA, 30 bp, Artificial Sequence
  Synthetic oligonucleotide
agttttcgcagcaaaactgatacgtcctta

SEQ ID NO: 510496 - DNA, 31 bp, Artificial Sequence
  Synthetic oligonucleotide
atctttgaggggtgataaataacattcctta

SEQ ID NO: 510497 - DNA, 30 bp, Artificial Sequence
  Synthetic oligonucleotide
gtacttgatcacagactaagaacttcctta

SEQ ID NO: 510498 - DNA, 30 bp, Artificial Sequence
  Synthetic oligonucleotide
tgtggtaaaagtgataaaggtagttcctta

SEQ ID NO: 510499 - DNA, 30 bp, Artificial Sequence
  Synthetic oligonucleotide
gcatactaggggatcttgcctttttcctta

SEQ ID NO: 510500 - DNA, 30 bp, Artificial Sequence
  Synthetic oligonucleotide
agtcacgtcttaaaaagaatattaagctta

SEQ ID NO: 510501 - DNA, 30 bp, Artificial Sequence
  Synthetic oligonucleotide
tatctgaccgtcaagcacttctatagctta

SEQ ID NO: 510502 - DNA, 30 bp, Artificial Sequence
  Synthetic oligonucleotide
aatactgttatgttccattaacctagctta

SEQ ID NO: 510503 - DNA, 30 bp, Artificial Sequence
  Synthetic oligonucleotide
gtttataattcattaaattactgtagctta

SEQ ID NO: 510504 - DNA, 30 bp, Artificial Sequence
  Synthetic oligonucleotide
tataagccgtcagtctaggactttagctta

SEQ ID NO: 510505 - DNA, 30 bp, Artificial Sequence
  Synthetic oligonucleotide
cacggcgcagattagcttgcaaagcgctta

SEQ ID NO: 510506 - DNA, 30 bp, Artificial Sequence
  Synthetic oligonucleotide
agcatttcccgcgactgaatagatcgctta

SEQ ID NO: 510507 - DNA, 30 bp, Artificial Sequence
  Synthetic oligonucleotide
gccgcagatgtcagcggactctgaggctta

SEQ ID NO: 510508 - DNA, 30 bp, Artificial Sequence
  Synthetic oligonucleotide
gcctgttccgcatcaaaggccaacggctta

SEQ ID NO: 510509 - DNA, 30 bp, Artificial Sequence
  Synthetic oligonucleotide
aaaaaactcttttggacctggtacggctta

SEQ ID NO: 510510 - DNA, 30 bp, Artificial Sequence
  Synthetic oligonucleotide
attttgacgctttcataaaggagcggctta

SEQ ID NO: 510511 - DNA, 30 bp, Artificial Sequence
  Synthetic oligonucleotide
gtggtctcagcctcgtaggcgcgcggctta

SEQ ID NO: 510512 - DNA, 30 bp, Artificial Sequence
  Synthetic oligonucleotide
gccgagtgggtctccaagcggatgggctta

SEQ ID NO: 510513 - DNA, 30 bp, Artificial Sequence
  Synthetic oligonucleotide
atgcaatgcaaaggtggtcattgctgctta

SEQ ID NO: 510514 - DNA, 30 bp, Artificial Sequence
  Synthetic oligonucleotide
ttaggaacagctaatcgcaggatctgctta

SEQ ID NO: 510515 - DNA, 30 bp, Artificial Sequence
  Synthetic oligonucleotide
gaagcgcgtcgaaaccagtgcaggtgctta

SEQ ID NO: 510516 - DNA, 30 bp, Artificial Sequence
  Synthetic oligonucleotide
aggtcggcagaacagcagatattgtgctta

SEQ ID NO: 510517 - DNA, 30 bp, Artificial Sequence
  Synthetic oligonucleotide
cggcggatgaattagccgtatgtttgctta

SEQ ID NO: 510518 - DNA, 30 bp, Artificial Sequence
  Synthetic oligonucleotide
atggtggtaattatattatgattaatctta

SEQ ID NO: 510519 - DNA, 30 bp, Artificial Sequence
  Synthetic oligonucleotide
tccaactcactgaccgatatagacatctta

SEQ ID NO: 510520 - DNA, 30 bp, Artificial Sequence
  Synthetic oligonucleotide
cgagcaagaggtgaaatatagtatatctta

SEQ ID NO: 510521 - DNA, 30 bp, Artificial Sequence
  Synthetic oligonucleotide
ccgtaactacccatggtaaatcgtatctta

SEQ ID NO: 510522 - DNA, 30 bp, Artificial Sequence
  Synthetic oligonucleotide
gtatgaaatcctcatcctcacagactctta

SEQ ID NO: 510523 - DNA, 30 bp, Artificial Sequence
  Synthetic oligonucleotide
tttcaatacccatagtcgcctgtactctta

SEQ ID NO: 510524 - DNA, 30 bp, Artificial Sequence
  Synthetic oligonucleotide
gtgtcgagggcacgaagcccccagctctta

SEQ ID NO: 510525 - DNA, 30 bp, Artificial Sequence
  Synthetic oligonucleotide
gcgagccaccagaacggatattggctctta

SEQ ID NO: 510526 - DNA, 30 bp, Artificial Sequence
  Synthetic oligonucleotide
aatgagcgaggacatatacgggtgctctta

SEQ ID NO: 510527 - DNA, 30 bp, Artificial Sequence
  Synthetic oligonucleotide
gcaattttagttggaaacaaatctctctta

SEQ ID NO: 510528 - DNA, 30 bp, Artificial Sequence
  Synthetic oligonucleotide
ttcgggtagttaggagttaagcaagtctta

SEQ ID NO: 510529 - DNA, 30 bp, Artificial Sequence
  Synthetic oligonucleotide
agaggagttacaagcaccccaacggtctta

SEQ ID NO: 510530 - DNA, 30 bp, Artificial Sequence
  Synthetic oligonucleotide
tgtcaataagtattgaacgcaagtgtctta

SEQ ID NO: 510531 - DNA, 30 bp, Artificial Sequence
  Synthetic oligonucleotide
aaaccgctcacacgtagttttgtattctta

SEQ ID NO: 510532 - DNA, 30 bp, Artificial Sequence
  Synthetic oligonucleotide
tataatctcacatagtctatgagcttctta

SEQ ID NO: 510533 - DNA, 30 bp, Artificial Sequence
  Synthetic oligonucleotide
ctagaccataatagttcagtcatcttctta

SEQ ID NO: 510534 - DNA, 30 bp, Artificial Sequence
  Synthetic oligonucleotide
ttacaatcaagcagtaattagacgttctta

SEQ ID NO: 510535 - DNA, 30 bp, Artificial Sequence
  Synthetic oligonucleotide
tccataacgttaagcaaatttgtcaagtta

SEQ ID NO: 510536 - DNA, 30 bp, Artificial Sequence
  Synthetic oligonucleotide
ttaagtatatactgtgcccagcctaagtta

SEQ ID NO: 510537 - DNA, 30 bp, Artificial Sequence
  Synthetic oligonucleotide
agtatttcaactgcccacatgtttaagtta

SEQ ID NO: 510538 - DNA, 30 bp, Artificial Sequence
  Synthetic oligonucleotide
ataattttttgttcattaaatcaacagtta

SEQ ID NO: 510539 - DNA, 30 bp, Artificial Sequence
  Synthetic oligonucleotide
gtccttaaaggaccatcgagtccacagtta

SEQ ID NO: 510540 - DNA, 30 bp, Artificial Sequence
  Synthetic oligonucleotide
ctatgtaggcagggcgggtcataccagtta

SEQ ID NO: 510541 - DNA, 30 bp, Artificial Sequence
  Synthetic oligonucleotide
gtcgctgcgttctgcgagcattcccagtta

SEQ ID NO: 510542 - DNA, 30 bp, Artificial Sequence
  Synthetic oligonucleotide
tggcgaagccacgctccagaaaagcagtta

SEQ ID NO: 510543 - DNA, 30 bp, Artificial Sequence
  Synthetic oligonucleotide
atgtttcgccgtttgggtacaacgcagtta

SEQ ID NO: 510544 - DNA, 30 bp, Artificial Sequence
  Synthetic oligonucleotide
cgcaggttatactactgcaacgtgcagtta

SEQ ID NO: 510545 - DNA, 30 bp, Artificial Sequence
  Synthetic oligonucleotide
cttgtcacggtcttcagccttgaagagtta

SEQ ID NO: 510546 - DNA, 30 bp, Artificial Sequence
  Synthetic oligonucleotide
tatttgctgttgcaacgtacgtcagagtta

SEQ ID NO: 510547 - DNA, 30 bp, Artificial Sequence
  Synthetic oligonucleotide
gtcttatcaataggaaggacttgagagtta

SEQ ID NO: 510548 - DNA, 30 bp, Artificial Sequence
  Synthetic oligonucleotide
ataatagttagttaaaccttgctagagtta

SEQ ID NO: 510549 - DNA, 30 bp, Artificial Sequence
  Synthetic oligonucleotide
taactcggacttaccgacgttttagagtta

SEQ ID NO: 510550 - DNA, 30 bp, Artificial Sequence
  Synthetic oligonucleotide
gtaaaaataaagggacgcgaacacgagtta

SEQ ID NO: 510551 - DNA, 30 bp, Artificial Sequence
  Synthetic oligonucleotide
cctaggtcgatctctagcgacacggagtta

SEQ ID NO: 510552 - DNA, 30 bp, Artificial Sequence
  Synthetic oligonucleotide
gcaaaccaacccggcatccgcccggagtta

SEQ ID NO: 510553 - DNA, 30 bp, Artificial Sequence
  Synthetic oligonucleotide
agacccccgcactctagtcttcgggagtta

SEQ ID NO: 510554 - DNA, 30 bp, Artificial Sequence
  Synthetic oligonucleotide
cgtacgtggagtgcgtaactttgggagtta

SEQ ID NO: 510555 - DNA, 30 bp, Artificial Sequence
  Synthetic oligonucleotide
tcgtgctgaaaaccagggtcccctgagtta

SEQ ID NO: 510556 - DNA, 30 bp, Artificial Sequence
  Synthetic oligonucleotide
atctagttttgtaccggcgtagctgagtta

SEQ ID NO: 510557 - DNA, 30 bp, Artificial Sequence
  Synthetic oligonucleotide
gtctgtttaattgctaatggaagtgagtta

SEQ ID NO: 510558 - DNA, 30 bp, Artificial Sequence
  Synthetic oligonucleotide
cggtggataacgttgtggtaaccatagtta

SEQ ID NO: 510559 - DNA, 30 bp, Artificial Sequence; identical to SEQ ID NO: 206807
  Synthetic oligonucleotide

SEQ ID NO: 510560 - DNA, 30 bp, Artificial Sequence; identical to SEQ ID NO: 328023
  Synthetic oligonucleotide

SEQ ID NO: 510561 - DNA, 30 bp, Artificial Sequence; identical to SEQ ID NO: 248139
  Synthetic oligonucleotide

SEQ ID NO: 510562 - DNA, 30 bp, Artificial Sequence; identical to SEQ ID NO: 313551
  Synthetic oligonucleotide

SEQ ID NO: 510563 - DNA, 30 bp, Artificial Sequence; identical to SEQ ID NO: 143130
  Synthetic oligonucleotide

SEQ ID NO: 510564 - DNA, 30 bp, Artificial Sequence; identical to SEQ ID NO: 283290
  Synthetic oligonucleotide

SEQ ID NO: 510565 - DNA, 30 bp, Artificial Sequence; identical to SEQ ID NO: 324710
  Synthetic oligonucleotide

SEQ ID NO: 510566 - DNA, 30 bp, Artificial Sequence; identical to SEQ ID NO: 277884
  Synthetic oligonucleotide

SEQ ID NO: 510567 - DNA, 30 bp, Artificial Sequence; identical to SEQ ID NO: 319956
  Synthetic oligonucleotide

SEQ ID NO: 510568 - DNA, 30 bp, Artificial Sequence; identical to SEQ ID NO: 191487
  Synthetic oligonucleotide

SEQ ID NO: 510569 - DNA, 30 bp, Artificial Sequence; identical to SEQ ID NO: 258247
  Synthetic oligonucleotide

SEQ ID NO: 510570 - DNA, 30 bp, Artificial Sequence; identical to SEQ ID NO: 474696
  Synthetic oligonucleotide

SEQ ID NO: 510571 - DNA, 30 bp, Artificial Sequence; identical to SEQ ID NO: 417618
  Synthetic oligonucleotide

SEQ ID NO: 510572 - DNA, 30 bp, Artificial Sequence; identical to SEQ ID NO: 184449
  Synthetic oligonucleotide

SEQ ID NO: 510573 - DNA, 30 bp, Artificial Sequence; identical to SEQ ID NO: 164790
  Synthetic oligonucleotide

SEQ ID NO: 510574 - DNA, 30 bp, Artificial Sequence; identical to SEQ ID NO: 336078
  Synthetic oligonucleotide

SEQ ID NO: 510575 - DNA, 30 bp, Artificial Sequence; identical to SEQ ID NO: 114649
  Synthetic oligonucleotide

SEQ ID NO: 510576 - DNA, 30 bp, Artificial Sequence; identical to SEQ ID NO: 189802
  Synthetic oligonucleotide

SEQ ID NO: 510577 - DNA, 30 bp, Artificial Sequence; identical to SEQ ID NO: 105243
  Synthetic oligonucleotide

SEQ ID NO: 510578 - DNA, 30 bp, Artificial Sequence; identical to SEQ ID NO: 352741
  Synthetic oligonucleotide

SEQ ID NO: 510579 - DNA, 30 bp, Artificial Sequence; identical to SEQ ID NO: 291553
  Synthetic oligonucleotide

SEQ ID NO: 510580 - DNA, 30 bp, Artificial Sequence; identical to SEQ ID NO: 149729
  Synthetic oligonucleotide

SEQ ID NO: 510581 - DNA, 30 bp, Artificial Sequence; identical to SEQ ID NO: 246471
  Synthetic oligonucleotide

SEQ ID NO: 510582 - DNA, 30 bp, Artificial Sequence; identical to SEQ ID NO: 92238
  Synthetic oligonucleotide

SEQ ID NO: 510583 - DNA, 30 bp, Artificial Sequence; identical to SEQ ID NO: 225482
  Synthetic oligonucleotide

SEQ ID NO: 510584 - DNA, 30 bp, Artificial Sequence; identical to SEQ ID NO: 275697
  Synthetic oligonucleotide

SEQ ID NO: 510585 - DNA, 30 bp, Artificial Sequence; identical to SEQ ID NO: 220885
  Synthetic oligonucleotide

SEQ ID NO: 510586 - DNA, 30 bp, Artificial Sequence; identical to SEQ ID NO: 272301
  Synthetic oligonucleotide

SEQ ID NO: 510587 - DNA, 30 bp, Artificial Sequence; identical to SEQ ID NO: 210826
  Synthetic oligonucleotide

SEQ ID NO: 510588 - DNA, 30 bp, Artificial Sequence; identical to SEQ ID NO: 265752
  Synthetic oligonucleotide

SEQ ID NO: 510589 - DNA, 30 bp, Artificial Sequence; identical to SEQ ID NO: 262800
  Synthetic oligonucleotide

SEQ ID NO: 510590 - DNA, 30 bp, Artificial Sequence; identical to SEQ ID NO: 444155
  Synthetic oligonucleotide

SEQ ID NO: 510591 - DNA, 30 bp, Artificial Sequence; identical to SEQ ID NO: 250991
  Synthetic oligonucleotide

SEQ ID NO: 510592 - DNA, 30 bp, Artificial Sequence; identical to SEQ ID NO: 268910
  Synthetic oligonucleotide

SEQ ID NO: 510593 - DNA, 30 bp, Artificial Sequence; identical to SEQ ID NO: 489251
  Synthetic oligonucleotide

SEQ ID NO: 510594 - DNA, 30 bp, Artificial Sequence; identical to SEQ ID NO: 189737
  Synthetic oligonucleotide

SEQ ID NO: 510595 - DNA, 30 bp, Artificial Sequence; identical to SEQ ID NO: 139621
  Synthetic oligonucleotide

SEQ ID NO: 510596 - DNA, 30 bp, Artificial Sequence; identical to SEQ ID NO: 390539
  Synthetic oligonucleotide

SEQ ID NO: 510597 - DNA, 30 bp, Artificial Sequence; identical to SEQ ID NO: 299823
  Synthetic oligonucleotide

SEQ ID NO: 510598 - DNA, 30 bp, Artificial Sequence; identical to SEQ ID NO: 196335
  Synthetic oligonucleotide

SEQ ID NO: 510599 - DNA, 30 bp, Artificial Sequence; identical to SEQ ID NO: 14368
  Synthetic oligonucleotide

SEQ ID NO: 510600 - DNA, 30 bp, Artificial Sequence; identical to SEQ ID NO: 12934
  Synthetic oligonucleotide

SEQ ID NO: 510601 - DNA, 30 bp, Artificial Sequence; identical to SEQ ID NO: 10763
  Synthetic oligonucleotide

SEQ ID NO: 510602 - DNA, 30 bp, Artificial Sequence; identical to SEQ ID NO: 10897
  Synthetic oligonucleotide

SEQ ID NO: 510603 - DNA, 30 bp, Artificial Sequence; identical to SEQ ID NO: 10627
  Synthetic oligonucleotide

SEQ ID NO: 510604 - DNA, 30 bp, Artificial Sequence; identical to SEQ ID NO: 16362
  Synthetic oligonucleotide

SEQ ID NO: 510605 - DNA, 30 bp, Artificial Sequence; identical to SEQ ID NO: 10768
  Synthetic oligonucleotide

SEQ ID NO: 510606 - DNA, 30 bp, Artificial Sequence; identical to SEQ ID NO: 13552
  Synthetic oligonucleotide

SEQ ID NO: 510607 - DNA, 30 bp, Artificial Sequence; identical to SEQ ID NO: 16298
  Synthetic oligonucleotide

SEQ ID NO: 510608 - DNA, 30 bp, Artificial Sequence; identical to SEQ ID NO: 16565
  Synthetic oligonucleotide

SEQ ID NO: 510609 - DNA, 30 bp, Artificial Sequence; identical to SEQ ID NO: 23431
  Synthetic oligonucleotide

SEQ ID NO: 510610 - DNA, 30 bp, Artificial Sequence; identical to SEQ ID NO: 12082
  Synthetic oligonucleotide

SEQ ID NO: 510611 - DNA, 30 bp, Artificial Sequence; identical to SEQ ID NO: 10646
  Synthetic oligonucleotide

SEQ ID NO: 510612 - DNA, 30 bp, Artificial Sequence; identical to SEQ ID NO: 10993
  Synthetic oligonucleotide

SEQ ID NO: 510613 - DNA, 30 bp, Artificial Sequence; identical to SEQ ID NO: 10731
  Synthetic oligonucleotide

SEQ ID NO: 510614 - DNA, 30 bp, Artificial Sequence; identical to SEQ ID NO: 10677
  Synthetic oligonucleotide

SEQ ID NO: 510615 - DNA, 30 bp, Artificial Sequence; identical to SEQ ID NO: 10628
  Synthetic oligonucleotide

SEQ ID NO: 510616 - DNA, 30 bp, Artificial Sequence; identical to SEQ ID NO: 10728
  Synthetic oligonucleotide

SEQ ID NO: 510617 - DNA, 30 bp, Artificial Sequence; identical to SEQ ID NO: 10676
  Synthetic oligonucleotide

SEQ ID NO: 510618 - DNA, 30 bp, Artificial Sequence; identical to SEQ ID NO: 11809
  Synthetic oligonucleotide

SEQ ID NO: 510619 - DNA, 30 bp, Artificial Sequence; identical to SEQ ID NO: 11683
  Synthetic oligonucleotide

SEQ ID NO: 510620 - DNA, 30 bp, Artificial Sequence; identical to SEQ ID NO: 10828
  Synthetic oligonucleotide

SEQ ID NO: 510621 - DNA, 30 bp, Artificial Sequence; identical to SEQ ID NO: 10637
  Synthetic oligonucleotide

SEQ ID NO: 510622 - DNA, 30 bp, Artificial Sequence; identical to SEQ ID NO: 10679
  Synthetic oligonucleotide

SEQ ID NO: 510623 - DNA, 30 bp, Artificial Sequence; identical to SEQ ID NO: 11403
  Synthetic oligonucleotide

SEQ ID NO: 510624 - DNA, 30 bp, Artificial Sequence; identical to SEQ ID NO: 10690
  Synthetic oligonucleotide

SEQ ID NO: 510625 - DNA, 30 bp, Artificial Sequence; identical to SEQ ID NO: 11706
  Synthetic oligonucleotide

SEQ ID NO: 510626 - DNA, 29 bp, Artificial Sequence
  Synthetic oligonucleotide
attgtatatccctgttggcattacgccat

SEQ ID NO: 510627 - DNA, 30 bp, Artificial Sequence; identical to SEQ ID NO: 10576
  Synthetic oligonucleotide

SEQ ID NO: 510628 - DNA, 30 bp, Artificial Sequence; identical to SEQ ID NO: 10842
  Synthetic oligonucleotide

SEQ ID NO: 510629 - DNA, 30 bp, Artificial Sequence; identical to SEQ ID NO: 25669
  Synthetic oligonucleotide

SEQ ID NO: 510630 - DNA, 30 bp, Artificial Sequence; identical to SEQ ID NO: 11270
  Synthetic oligonucleotide

SEQ ID NO: 510631 - DNA, 30 bp, Artificial Sequence; identical to SEQ ID NO: 17247
  Synthetic oligonucleotide

SEQ ID NO: 510632 - DNA, 30 bp, Artificial Sequence; identical to SEQ ID NO: 11100
  Synthetic oligonucleotide

SEQ ID NO: 510633 - DNA, 30 bp, Artificial Sequence; identical to SEQ ID NO: 11324
  Synthetic oligonucleotide

SEQ ID NO: 510634 - DNA, 30 bp, Artificial Sequence; identical to SEQ ID NO: 12177
  Synthetic oligonucleotide

SEQ ID NO: 510635 - DNA, 30 bp, Artificial Sequence; identical to SEQ ID NO: 11485
  Synthetic oligonucleotide

SEQ ID NO: 510636 - DNA, 30 bp, Artificial Sequence; identical to SEQ ID NO: 10880
  Synthetic oligonucleotide

SEQ ID NO: 510637 - DNA, 30 bp, Artificial Sequence; identical to SEQ ID NO: 11000
  Synthetic oligonucleotide

SEQ ID NO: 510638 - DNA, 30 bp, Artificial Sequence; identical to SEQ ID NO: 13659
  Synthetic oligonucleotide

SEQ ID NO: 510639 - DNA, 30 bp, Artificial Sequence; identical to SEQ ID NO: 11064
  Synthetic oligonucleotide

SEQ ID NO: 510640 - DNA, 30 bp, Artificial Sequence; identical to SEQ ID NO: 14336
  Synthetic oligonucleotide

SEQ ID NO: 510641 - DNA, 30 bp, Artificial Sequence; identical to SEQ ID NO: 10571
  Synthetic oligonucleotide

SEQ ID NO: 510642 - DNA, 30 bp, Artificial Sequence; identical to SEQ ID NO: 10564
  Synthetic oligonucleotide

SEQ ID NO: 510643 - DNA, 30 bp, Artificial Sequence; identical to SEQ ID NO: 10586
  Synthetic oligonucleotide

SEQ ID NO: 510644 - DNA, 30 bp, Artificial Sequence; identical to SEQ ID NO: 10686
  Synthetic oligonucleotide

SEQ ID NO: 510645 - DNA, 30 bp, Artificial Sequence; identical to SEQ ID NO: 11311
  Synthetic oligonucleotide

SEQ ID NO: 510646 - DNA, 30 bp, Artificial Sequence; identical to SEQ ID NO: 10708
  Synthetic oligonucleotide

SEQ ID NO: 510647 - DNA, 30 bp, Artificial Sequence; identical to SEQ ID NO: 11296
  Synthetic oligonucleotide

SEQ ID NO: 510648 - DNA, 30 bp, Artificial Sequence; identical to SEQ ID NO: 11901
  Synthetic oligonucleotide

SEQ ID NO: 510649 - DNA, 25 bp, Artificial Sequence
  Synthetic oligonucleotide
cctatcgaaaacccccctcatcaca

SEQ ID NO: 510650 - DNA, 30 bp, Artificial Sequence; identical to SEQ ID NO: 31831
  Synthetic oligonucleotide

SEQ ID NO: 510651 - DNA, 30 bp, Artificial Sequence; identical to SEQ ID NO: 10781
  Synthetic oligonucleotide

SEQ ID NO: 510652 - DNA, 30 bp, Artificial Sequence; identical to SEQ ID NO: 10692
  Synthetic oligonucleotide

SEQ ID NO: 510653 - DNA, 30 bp, Artificial Sequence; identical to SEQ ID NO: 10772
  Synthetic oligonucleotide

SEQ ID NO: 510654 - DNA, 30 bp, Artificial Sequence; identical to SEQ ID NO: 10866
  Synthetic oligonucleotide

SEQ ID NO: 510655 - DNA, 30 bp, Artificial Sequence; identical to SEQ ID NO: 10755
  Synthetic oligonucleotide

SEQ ID NO: 510656 - DNA, 30 bp, Artificial Sequence; identical to SEQ ID NO: 10626
  Synthetic oligonucleotide

SEQ ID NO: 510657 - DNA, 30 bp, Artificial Sequence; identical to SEQ ID NO: 10625
  Synthetic oligonucleotide

SEQ ID NO: 510658 - DNA, 30 bp, Artificial Sequence; identical to SEQ ID NO: 11367
  Synthetic oligonucleotide

SEQ ID NO: 510659 - DNA, 30 bp, Artificial Sequence; identical to SEQ ID NO: 11472
  Synthetic oligonucleotide

SEQ ID NO: 510660 - DNA, 30 bp, Artificial Sequence; identical to SEQ ID NO: 19285
  Synthetic oligonucleotide

SEQ ID NO: 510661 - DNA, 30 bp, Artificial Sequence; identical to SEQ ID NO: 12017
  Synthetic oligonucleotide

SEQ ID NO: 510662 - DNA, 30 bp, Artificial Sequence; identical to SEQ ID NO: 10699
  Synthetic oligonucleotide

SEQ ID NO: 510663 - DNA, 30 bp, Artificial Sequence; identical to SEQ ID NO: 10651
  Synthetic oligonucleotide

SEQ ID NO: 510664 - DNA, 30 bp, Artificial Sequence; identical to SEQ ID NO: 10570
  Synthetic oligonucleotide

SEQ ID NO: 510665 - DNA, 30 bp, Artificial Sequence; identical to SEQ ID NO: 10715
  Synthetic oligonucleotide

SEQ ID NO: 510666 - DNA, 30 bp, Artificial Sequence; identical to SEQ ID NO: 11210
  Synthetic oligonucleotide

SEQ ID NO: 510667 - DNA, 30 bp, Artificial Sequence; identical to SEQ ID NO: 12963
  Synthetic oligonucleotide

SEQ ID NO: 510668 - DNA, 30 bp, Artificial Sequence; identical to SEQ ID NO: 11034
  Synthetic oligonucleotide

SEQ ID NO: 510669 - DNA, 30 bp, Artificial Sequence; identical to SEQ ID NO: 11044
  Synthetic oligonucleotide

SEQ ID NO: 510670 - DNA, 30 bp, Artificial Sequence; identical to SEQ ID NO: 10650
  Synthetic oligonucleotide

SEQ ID NO: 510671 - DNA, 30 bp, Artificial Sequence; identical to SEQ ID NO: 12095
  Synthetic oligonucleotide

SEQ ID NO: 510672 - DNA, 30 bp, Artificial Sequence; identical to SEQ ID NO: 10573
  Synthetic oligonucleotide

SEQ ID NO: 510673 - DNA, 30 bp, Artificial Sequence; identical to SEQ ID NO: 10595
  Synthetic oligonucleotide

SEQ ID NO: 510674 - DNA, 30 bp, Artificial Sequence; identical to SEQ ID NO: 15069
  Synthetic oligonucleotide

SEQ ID NO: 510675 - DNA, 30 bp, Artificial Sequence; identical to SEQ ID NO: 10668
  Synthetic oligonucleotide

SEQ ID NO: 510676 - DNA, 30 bp, Artificial Sequence; identical to SEQ ID NO: 118323
  Synthetic oligonucleotide

SEQ ID NO: 510677 - DNA, 30 bp, Artificial Sequence; identical to SEQ ID NO: 10635
  Synthetic oligonucleotide

SEQ ID NO: 510678 - DNA, 34 bp, Artificial Sequence; identical to SEQ ID NO: 10580
  Synthetic oligonucleotide

SEQ ID NO: 510679 - DNA, 34 bp, Artificial Sequence; identical to SEQ ID NO: 10562
  Synthetic oligonucleotide

SEQ ID NO: 510680 - DNA, 30 bp, Artificial Sequence; identical to SEQ ID NO: 13891
  Synthetic oligonucleotide

SEQ ID NO: 510681 - DNA, 30 bp, Artificial Sequence; identical to SEQ ID NO: 12375
  Synthetic oligonucleotide

SEQ ID NO: 510682 - DNA, 30 bp, Artificial Sequence; identical to SEQ ID NO: 10934
  Synthetic oligonucleotide

SEQ ID NO: 510683 - DNA, 30 bp, Artificial Sequence; identical to SEQ ID NO: 10569
  Synthetic oligonucleotide

SEQ ID NO: 510684 - DNA, 30 bp, Artificial Sequence; identical to SEQ ID NO: 10834
  Synthetic oligonucleotide

SEQ ID NO: 510685 - DNA, 30 bp, Artificial Sequence; identical to SEQ ID NO: 14495
  Synthetic oligonucleotide

SEQ ID NO: 510686 - DNA, 30 bp, Artificial Sequence; identical to SEQ ID NO: 11045
  Synthetic oligonucleotide

SEQ ID NO: 510687 - DNA, 30 bp, Artificial Sequence; identical to SEQ ID NO: 11365
  Synthetic oligonucleotide

SEQ ID NO: 510688 - DNA, 30 bp, Artificial Sequence; identical to SEQ ID NO: 10705
  Synthetic oligonucleotide

SEQ ID NO: 510689 - DNA, 30 bp, Artificial Sequence; identical to SEQ ID NO: 10778
  Synthetic oligonucleotide

SEQ ID NO: 510690 - DNA, 30 bp, Artificial Sequence; identical to SEQ ID NO: 10695
  Synthetic oligonucleotide

SEQ ID NO: 510691 - DNA, 30 bp, Artificial Sequence; identical to SEQ ID NO: 11240
  Synthetic oligonucleotide

SEQ ID NO: 510692 - DNA, 30 bp, Artificial Sequence; identical to SEQ ID NO: 11018
  Synthetic oligonucleotide

SEQ ID NO: 510693 - DNA, 30 bp, Artificial Sequence; identical to SEQ ID NO: 11554
  Synthetic oligonucleotide

SEQ ID NO: 510694 - DNA, 30 bp, Artificial Sequence; identical to SEQ ID NO: 10850
  Synthetic oligonucleotide

SEQ ID NO: 510695 - DNA, 31 bp, Artificial Sequence; identical to SEQ ID NO: 10605
  Synthetic oligonucleotide

SEQ ID NO: 510696 - DNA, 30 bp, Artificial Sequence; identical to SEQ ID NO: 11423
  Synthetic oligonucleotide

SEQ ID NO: 510697 - DNA, 30 bp, Artificial Sequence; identical to SEQ ID NO: 10667
  Synthetic oligonucleotide

SEQ ID NO: 510698 - DNA, 30 bp, Artificial Sequence; identical to SEQ ID NO: 10712
  Synthetic oligonucleotide

SEQ ID NO: 510699 - DNA, 30 bp, Artificial Sequence; identical to SEQ ID NO: 12966
  Synthetic oligonucleotide

SEQ ID NO: 510700 - DNA, 30 bp, Artificial Sequence; identical to SEQ ID NO: 12688
  Synthetic oligonucleotide

SEQ ID NO: 510701 - DNA, 30 bp, Artificial Sequence; identical to SEQ ID NO: 10603
  Synthetic oligonucleotide

SEQ ID NO: 510702 - DNA, 30 bp, Artificial Sequence; identical to SEQ ID NO: 12898
  Synthetic oligonucleotide

SEQ ID NO: 510703 - DNA, 30 bp, Artificial Sequence; identical to SEQ ID NO: 11007
  Synthetic oligonucleotide

SEQ ID NO: 510704 - DNA, 30 bp, Artificial Sequence; identical to SEQ ID NO: 10634
  Synthetic oligonucleotide

SEQ ID NO: 510705 - DNA, 30 bp, Artificial Sequence; identical to SEQ ID NO: 51081
  Synthetic oligonucleotide

SEQ ID NO: 510706 - DNA, 30 bp, Artificial Sequence; identical to SEQ ID NO: 10691
  Synthetic oligonucleotide

SEQ ID NO: 510707 - DNA, 30 bp, Artificial Sequence; identical to SEQ ID NO: 10582
  Synthetic oligonucleotide

SEQ ID NO: 510708 - DNA, 30 bp, Artificial Sequence; identical to SEQ ID NO: 10946
  Synthetic oligonucleotide

SEQ ID NO: 510709 - DNA, 30 bp, Artificial Sequence; identical to SEQ ID NO: 10656
  Synthetic oligonucleotide

SEQ ID NO: 510710 - DNA, 30 bp, Artificial Sequence; identical to SEQ ID NO: 11002
  Synthetic oligonucleotide

SEQ ID NO: 510711 - DNA, 30 bp, Artificial Sequence; identical to SEQ ID NO: 11249
  Synthetic oligonucleotide

SEQ ID NO: 510712 - DNA, 30 bp, Artificial Sequence; identical to SEQ ID NO: 10633
  Synthetic oligonucleotide

SEQ ID NO: 510713 - DNA, 30 bp, Artificial Sequence; identical to SEQ ID NO: 11839
  Synthetic oligonucleotide

SEQ ID NO: 510714 - DNA, 30 bp, Artificial Sequence; identical to SEQ ID NO: 13333
  Synthetic oligonucleotide

SEQ ID NO: 510715 - DNA, 30 bp, Artificial Sequence; identical to SEQ ID NO: 22828
  Synthetic oligonucleotide

SEQ ID NO: 510716 - DNA, 30 bp, Artificial Sequence; identical to SEQ ID NO: 14665
  Synthetic oligonucleotide

SEQ ID NO: 510717 - DNA, 28 bp, Artificial Sequence
  Synthetic oligonucleotide
tcgatatatggtcgggtattcgatattt

SEQ ID NO: 510718 - DNA, 30 bp, Artificial Sequence; identical to SEQ ID NO: 10666
  Synthetic oligonucleotide

SEQ ID NO: 510719 - DNA, 30 bp, Artificial Sequence; identical to SEQ ID NO: 11812
  Synthetic oligonucleotide

SEQ ID NO: 510720 - DNA, 30 bp, Artificial Sequence; identical to SEQ ID NO: 12915
  Synthetic oligonucleotide

SEQ ID NO: 510721 - DNA, 30 bp, Artificial Sequence; identical to SEQ ID NO: 10802
  Synthetic oligonucleotide

SEQ ID NO: 510722 - DNA, 30 bp, Artificial Sequence; identical to SEQ ID NO: 141460
  Synthetic oligonucleotide

SEQ ID NO: 510723 - DNA, 30 bp, Artificial Sequence; identical to SEQ ID NO: 10561
  Synthetic oligonucleotide

SEQ ID NO: 510724 - DNA, 30 bp, Artificial Sequence; identical to SEQ ID NO: 13215
  Synthetic oligonucleotide

SEQ ID NO: 510725 - DNA, 34 bp, Artificial Sequence; identical to SEQ ID NO: 10599
  Synthetic oligonucleotide

SEQ ID NO: 510726 - DNA, 30 bp, Artificial Sequence; identical to SEQ ID NO: 10623
  Synthetic oligonucleotide

SEQ ID NO: 510727 - DNA, 30 bp, Artificial Sequence; identical to SEQ ID NO: 11688
  Synthetic oligonucleotide

SEQ ID NO: 510728 - DNA, 28 bp, Artificial Sequence
  Synthetic oligonucleotide
tgatctgttgtgttttcctcttgtgtat

SEQ ID NO: 510729 - DNA, 30 bp, Artificial Sequence; identical to SEQ ID NO: 10592
  Synthetic oligonucleotide

SEQ ID NO: 510730 - DNA, 27 bp, Artificial Sequence
  Synthetic oligonucleotide
tgatgtgtaggtttactcccgtataaa

SEQ ID NO: 510731 - DNA, 30 bp, Artificial Sequence; identical to SEQ ID NO: 10567
  Synthetic oligonucleotide

SEQ ID NO: 510732 - DNA, 30 bp, Artificial Sequence; identical to SEQ ID NO: 10953
  Synthetic oligonucleotide

SEQ ID NO: 510733 - DNA, 30 bp, Artificial Sequence; identical to SEQ ID NO: 10987
  Synthetic oligonucleotide

SEQ ID NO: 510734 - DNA, 30 bp, Artificial Sequence; identical to SEQ ID NO: 10619
  Synthetic oligonucleotide

SEQ ID NO: 510735 - DNA, 30 bp, Artificial Sequence; identical to SEQ ID NO: 10607
  Synthetic oligonucleotide

SEQ ID NO: 510736 - DNA, 34 bp, Artificial Sequence; identical to SEQ ID NO: 10589
  Synthetic oligonucleotide

SEQ ID NO: 510737 - DNA, 30 bp, Artificial Sequence; identical to SEQ ID NO: 10591
  Synthetic oligonucleotide

SEQ ID NO: 510738 - DNA, 30 bp, Artificial Sequence; identical to SEQ ID NO: 10696
  Synthetic oligonucleotide

SEQ ID NO: 510739 - DNA, 30 bp, Artificial Sequence; identical to SEQ ID NO: 47736
  Synthetic oligonucleotide

SEQ ID NO: 510740 - DNA, 30 bp, Artificial Sequence; identical to SEQ ID NO: 16205
  Synthetic oligonucleotide

SEQ ID NO: 510741 - DNA, 30 bp, Artificial Sequence; identical to SEQ ID NO: 193728
  Synthetic oligonucleotide

SEQ ID NO: 510742 - DNA, 30 bp, Artificial Sequence; identical to SEQ ID NO: 18803
  Synthetic oligonucleotide

SEQ ID NO: 510743 - DNA, 30 bp, Artificial Sequence; identical to SEQ ID NO: 10583
  Synthetic oligonucleotide

SEQ ID NO: 510744 - DNA, 30 bp, Artificial Sequence; identical to SEQ ID NO: 11021
  Synthetic oligonucleotide

SEQ ID NO: 510745 - DNA, 30 bp, Artificial Sequence; identical to SEQ ID NO: 10565
  Synthetic oligonucleotide

SEQ ID NO: 510746 - DNA, 30 bp, Artificial Sequence; identical to SEQ ID NO: 10598
  Synthetic oligonucleotide

SEQ ID NO: 510747 - DNA, 30 bp, Artificial Sequence; identical to SEQ ID NO: 11319
  Synthetic oligonucleotide

SEQ ID NO: 510748 - DNA, 30 bp, Artificial Sequence; identical to SEQ ID NO: 10615
  Synthetic oligonucleotide

SEQ ID NO: 510749 - DNA, 28 bp, Artificial Sequence
  Synthetic oligonucleotide
ttgtgtaggtttactcctctaccttgcg

SEQ ID NO: 510750 - DNA, 30 bp, Artificial Sequence; identical to SEQ ID NO: 11574
  Synthetic oligonucleotide

SEQ ID NO: 510751 - DNA, 28 bp, Artificial Sequence
  Synthetic oligonucleotide
ttgttgtgtaggtttactcccgtataaa

SEQ ID NO: 510752 - DNA, 31 bp, Artificial Sequence; identical to SEQ ID NO: 10594
  Synthetic oligonucleotide

SEQ ID NO: 510753 - DNA, 30 bp, Artificial Sequence; identical to SEQ ID NO: 18038
  Synthetic oligonucleotide

SEQ ID NO: 510754 - DNA, 30 bp, Artificial Sequence; identical to SEQ ID NO: 10560
  Synthetic oligonucleotide

SEQ ID NO: 510755 - DNA, 30 bp, Artificial Sequence; identical to SEQ ID NO: 11569
  Synthetic oligonucleotide

SEQ ID NO: 510756 - DNA, 30 bp, Artificial Sequence; identical to SEQ ID NO: 10604
  Synthetic oligonucleotide

SEQ ID NO: 510757 - DNA, 26 bp, Artificial Sequence
  Synthetic oligonucleotide
tttgtgtaggtttactcccgtataaa

SEQ ID NO: 510758 - DNA, 29 bp, Artificial Sequence
  Synthetic oligonucleotide
tttgtgtaggtttactcctctaccttgcg

SEQ ID NO: 510759 - DNA, 32 bp, Artificial Sequence; identical to SEQ ID NO: 10602
  Synthetic oligonucleotide

SEQ ID NO: 510760 - DNA, 29 bp, Artificial Sequence
  Synthetic oligonucleotide
tttgttgtgtaggtttactcccgtataaa

SEQ ID NO: 510761 - DNA, 26 bp, Artificial Sequence
  Synthetic oligonucleotide
tttgttgtgtaggtttactccctttt

SEQ ID NO: 510762 - DNA, 32 bp, Artificial Sequence; identical to SEQ ID NO: 10568
  Synthetic oligonucleotide

SEQ ID NO: 510763 - DNA, 31 bp, Artificial Sequence; identical to SEQ ID NO: 10581
  Synthetic oligonucleotide

SEQ ID NO: 510764 - DNA, 33 bp, Artificial Sequence
  Synthetic Oligonucleotide
tcgtcggcagcgtcagatgtgtataagagacag

SEQ ID NO: 510765 - DNA, 1 bp, Artificial Sequence
  Synthetic Oligonucleotide
t

SEQ ID NO: 510766 - DNA, 2 bp, Artificial Sequence
  Synthetic Oligonucleotide
ct

SEQ ID NO: 510767 - DNA, 3 bp, Artificial Sequence
  Synthetic Oligonucleotide
act

SEQ ID NO: 510768 - DNA, 18 bp, Artificial Sequence
  Synthetic Oligonucleotide
cggacacggtggcttagc

SEQ ID NO: 510769 - DNA, 20 bp, Artificial Sequence
  Synthetic Oligonucleotide
acgtactgcagtcatgctag
